(19) United States
(12) Patent Application Publication
(10) Pub. No.: US 2021/0388345 A1
(43) Pub. Date: Dec. 16, 2021

(54) PROFILING OF RHEUMATOID ARTHRITIS AUTOANTIBODY REPERTOIRE AND PEPTIDE CLASSIFIERS THEREFOR

(71) Applicant: ROCHE SEQUENCING SOLUTIONS, INC., Pleasanton, CA (US)

(72) Inventors: Hanying LI, Madison, WI (US); Ken LO, Madison, WI (US); Jigar PATEL, Verona, WI (US)

(21) Appl. No.: 17/287,202

(22) PCT Filed: Oct. 21, 2019
(86) PCT No.: PCT/EP2019/078568

§ 371 Date: Apr. 21, 2021

Related U.S. Application Data
(60) Provisional application No. 62/748,523, filed on Oct. 22, 2018.
(60) Provisional application No. 62/796,711, filed on Jan. 25, 2019.
(60) Provisional application No. 62/887,483, filed on Aug. 15, 2019.

(51) Int. Cl. C12N 15/10; C07K 14/47; G01N 33/564

(52) U.S. Cl. CPC C12N 15/1093; G01N 2800/102; G01N 33/564; C07K 14/4713

(57) ABSTRACT

The present disclosure provides for compositions and methods for identifying peptide classifiers. In one embodiment, a peptide classifier for diagnosing rheumatoid arthritis includes a composition comprising a plurality of molecules. Each molecule comprises a peptide having a sequence selected from SEQ ID NOS: 1-8861, wherein the plurality of molecules defines a classifier for rheumatoid arthritis.

### BACKGROUND

[0001] The disclosure relates, in general, to the design and selection of peptides for interrogating biomarkers and, more particularly, to a system and method for identifying and implementing a classifier including one or more variant peptides for diagnostic and predictive applications.

[0002] Rheumatoid arthritis (RA) is a progressive autoimmune disease characterized by inflammation and progressive erosion of joint cartilage and bone tissue. Through the seminal works of Schellekens et al. (J Clin Invest. 1998; 101(1):273-81 and Shi et al. (Proc Natl Acad Sci USA. 2011; 108:17372-7), post-translationally modified proteins were isolated from RA synovium and subsequent work demonstrated antibodies against both citrullinated and homocitrullinated proteins to be involved in RA pathogenesis. Development of anti-citrullinated protein antibodies (ACPA) blood tests ensued and is now a part of the American College of Rheumatology (ACR) and European League Against Rheumatism (EULAR) 2010 criteria in RA diagnosis (Arthritis Rheum. 2010; 62: pp. 2569-2581). ACPA positive subsets of RA patients typically follow a more aggressive disease course (Arthritis Res Ther 2005; 7:R949-58), thereby making early diagnosis critical for early intervention to minimize joint erosion and maintain subsequent joint motility for RA patients.

[0003] Increasingly, serum profiling using either protein or peptide arrays is becoming commonplace. Notable examples include systemic lupus erythematosus, infectious diseases, and cancer (see Lupus, 27(10), 1670-1678, Theranostics 2017; 7(16):3814-3823, and J Proteome Res. 2017; 16:204-216). While protein arrays may have the advantage of retaining native 3D conformation, complete enzymatic conversion of arginine and lysine to citrulline and homocitrulline, respectively, in recombinant proteins remain a challenge. Peptide arrays, on the other hand, can circumvent these problems by incorporating the necessary monomer during the peptide synthesis process. In the case of peptide arrays synthesized using maskless array synthesis (MAS), photoprotected citrulline and homocitrulline were added to the catalogue of canonical amino acids used during the synthesis process. Substitution of arginine and lysine to citrulline and homocitrulline, respectively, is accomplished during the array design process and incorporation efficiency is limited only by the efficiency of the coupling reaction. Thus, citrulline specific antibody reactivity detected on the peptide array is not conflated by the incomplete conversion of arginine to citrulline in the case of enzymatic conversion.

[0004] Antibody binding to its cognate antigen is achieved through non-covalent interactions between the complementarity determining regions (CDR) of the antibody against conformation adopted by the antigen. While structural studies have illustrated the importance of key residues at the interfaces, it is unclear what proportion of the human antibody repertoire recognizes epitopes derived from conformation adopted by contiguous amino acids (linear epitopes) and discontinuous amino acid stretches (conformational epitopes; see PLoS ONE 10:e0121673 and Biomed Res Int 2014, 12), especially in the context of RA. To the inventors' knowledge, an unbiased and comprehensive profiling of serum antibodies in RA serum samples against the entire human proteome, including the citrullinome and the homocitrullinome, has not been reported in the literature.

[0005] Accordingly, there is a need for improved processes and systems for the development of new classifiers for both diagnostic and prognostic applications.

### SUMMARY

[0006] The present invention overcomes the aforementioned drawbacks by providing a system and method for identification of a classifier for rheumatoid arthritis. An epitope-level characterization of autoantibodies from RA serum samples was performed using a peptide library including both native and citrullinated/homocitrullinated peptides. It is believed that this characterization provides the first unbiased and comprehensive profiling of serum antibodies in RA serum samples against the entire human proteome, including the citrullinome and the homocitrullinome. The results revealed a number of peptide features useful for constructing a classifier for RA, including peptide features that were not previously known to be associated with RA. The present disclosure illustrates how the resulting set of peptide features (SEQ ID NOS: 1-8861) may contribute to the preparation of a plurality of peptide classifiers having actual or predicted properties (i.e., sensitivity and specificity) that meet or exceed those of current commercially available gold-standard tests.

[0007] According to one embodiment of the present disclosure, a composition includes a plurality of molecules, each molecule comprising a peptide having a sequence selected from SEQ ID NOS: 1-8861. The plurality of molecules defines a classifier for rheumatoid arthritis.

[0008] In one aspect, the classifier discriminates between a sample derived from a first population and a sample derived from a second population. In another aspect, the first population is defined by subjects having at least one marker associated with a first disease state and the second population is defined by subjects lacking the at least one marker associated with the first disease state. In another aspect, the first disease state is rheumatoid arthritis. In another aspect, the marker associated with a first disease state is an antibody. In another aspect the marker associated with a first disease state is a serum marker.

[0009] In another aspect, the sample derived from the first population is a serum sample.

[0010] In another aspect, the sample derived from the second population is a serum sample.

[0011] In another aspect, the classifier discriminates between a sample derived from a first population and a sample derived from a second population. The sample derived from the first population comprises at least one marker associated with a first disease state and the sample derived from the second population lacks the at least one marker associated with the first disease state.

[0012] In another aspect, the classifier discriminates between a sample derived from a first population and a sample derived from a second population. At least one marker associated with a first disease state is present in the sample derived from the first population and wherein the at least one marker is absent in the sample derived from the second population.

[0013] In another aspect, the first disease state is rheumatoid arthritis.

[0014] In another aspect, the marker is one of an anti-citrullinated peptide antibody, and anti-homocitrullinated peptide antibody, an autoantibody, an anti-cyclic citrullinated peptide antibody, and an anti-cyclic homocitrullinated peptide antibody.

[0015] In another aspect, the classifier has a specificity of at least 0.90 and a sensitivity of at least 0.70.

[0016] In another aspect, the plurality of molecules is configured for binding to the marker associated with the first disease state.

[0017] In another aspect, the plurality of molecules comprises at least 3 different molecules.

[0018] In another aspect, the plurality of molecules comprises at least 4 different molecules.

[0019] In another aspect, the plurality of molecules comprises at least 5 different molecules.

[0020] In another aspect, the plurality of molecules comprises at least 6 different molecules.

[0021] In another aspect, the classifier has a specificity of at least 0.95 and a sensitivity of at least 0.70.

[0022] In another aspect, the classifier has a specificity of at least 0.95 and a sensitivity of at least 0.73.

[0023] In another aspect, the classifier has a specificity of at least 0.95 and a sensitivity of at least 0.77.

[0024] In another aspect, the classifier has a specificity of at least 0.95 and a sensitivity of at least 0.83.

[0025] In another aspect, the classifier has a specificity of at least 0.95 and a sensitivity of at least 0.89.

[0026] In another aspect, the classifier has a specificity of at least 0.95 and a sensitivity of at least 0.94.

[0027] In another aspect, the classifier distinguishes between a sample derived from a first group defined by a first disease state and a sample derived from a second group defined by a second disease state.

[0028] In another aspect, the first group is defined by subjects having a positive diagnosis for rheumatoid arthritis.

[0029] In another aspect, the classified distinguishes between the first group and the second group with a sensitivity of at least 0.95 and a specificity of at least 0.77.

[0030] In another aspect, the synthetic classifier is one of a diagnostic classifier and a prognostic classifier.

[0031] According to another embodiment of the present disclosure, a peptide classifier includes a plurality of molecules, each molecule comprising a peptide having a sequence selected from SEQ ID NOS: 1-8861, the molecules representing at least 4 different sequences selected from SEQ ID NOS: 1-8861.

[0032] In another aspect, the plurality of molecules is immobilized on a solid support.

[0033] In another aspect, the solid support is one of a microtiter plate, a membrane, a flow cell, a bead, a chip, a slide, a glass surface, and a plastic surface.

[0034] According to another embodiment, the present disclosure provides a method for identifying the presence of an antibody indicative of rheumatoid arthritis in a sample. The method includes contacting a sample derived from a subject with a composition according to the present disclosure, binding an antibody present in the sample to at least one of the plurality of molecules, thereby forming an antibody-peptide conjugate, and detecting the antibody-peptide conjugate, thereby identifying the presence of the antibody in the sample.

[0035] According to another embodiment, the present disclosure provides a kit for identifying the presence of an antibody indicative of rheumatoid arthritis in a sample. The kit includes a solid support having a plurality of molecules bound thereon, each molecule comprising a peptide having a sequence selected from SEQ ID NOS: 1-8861, and a detectable antibody to a human antibody.

[0036] In one aspect, the human antibody is one of an anti-citrullinated peptide antibody, and anti-homocitrullinated peptide antibody, an autoantibody, an and anti-cyclic citrullinated peptide antibody.

[0037] According to another embodiment, the present disclosure provides a device for a identifying the presence of an antibody indicative of rheumatoid arthritis in a sample. The device includes a solid support having a plurality of molecules bound thereon, each molecule comprising a peptide having a sequence selected from SEQ ID NOS: 1-8861, the solid support capable of receiving a sample derived from a subject at the location of the plurality of molecules.

[0038] In one aspect, the kit further includes at least one of a substrate, a stop solution, a wash buffer, a sample diluent, anti-CCP calibrators, anti-CCP reference controls, and instructions for use. In one aspect, the substrate includes Mg2+, phenolphthalein monophosphate (PMP), and a buffer solution. In another aspect, the stop solution includes sodium hydroxide, EDTA, carbonate buffer (pH>10). In another aspect, the wash buffer includes borate buffer, 0.4% (w/v) sodium azide. In another aspect, the sample diluent includes phosphate buffer, protein stabilizer, 0.5% (w/v) sodium azide. In another aspect, the anti-CCP calibrators include human plasma, buffer, <0.1% (w/v) sodium azide (varying U/mL). In another aspect, the anti-CCP reference control includes human plasma, buffer, <0.1% (w/v) sodium azide (varying U/mL). In another aspect, the positive and negative controls include human plasma, buffer, <0.1% (w/v) sodium azide (varying U/mL).

[0039] According to another embodiment, the present disclosure provides a kit for identifying the presence of an antibody indicative of rheumatoid arthritis in a sample. The kit includes a flow cell having a plurality of molecules bound therein, each molecule comprising a peptide having a sequence selected from SEQ ID NOS: 1-8861, the flow cell capable of receiving a sample derived from a subject at the location of the plurality of molecules. The kit further includes a running buffer and instructions for use.

[0040] In one aspect, the detectable antibody comprises peroxidase conjugated to an anti-human IgG antibody.

[0041] In another aspect, the plurality of molecules comprises peptides having a sequence selected from a first list, the first list consisting of the sequences in Table 1.

[0042] In another aspect the plurality of molecules comprises peptides having each of the sequences from the first list.

[0043] The foregoing and other aspects and advantages of the invention will appear from the following description. In the description, reference is made to the accompanying drawings which form a part hereof, and in which there is shown by way of illustration a preferred embodiment of the invention. Such embodiment does not necessarily represent the full scope of the invention, however, and reference is made therefore to the claims and herein for interpreting the scope of the invention.

### BRIEF DESCRIPTION OF THE DRAWINGS

[0044] FIG. 1 is an example of a method of for identifying a peptide classifier according to the present disclosure.

[0045] FIG. 2 is a schematic illustration of 16-mer peptides tiled at either 1 amino acid resolution or 4 amino acid resolution, including a table illustrating tiling of a portion of an example protein sequence Z (X_{A}X_{B}X_{C}X_{D}X_{E}X_{F}X_{G}X_{H}X_{I}X_{J}X_{K}X_{L}X_{M}X_{N}X_{O}X_{P}X_{Q}X_{R}X_{S} . . . ) represented with a series of 10-mer peptides tiled at 1 amino acid resolution, where each Xᵢ represent a single amino acid within the example protein sequence Z.

[0046] FIGS. 3A-3F are maps of the RA Abinome for native peptides (FIGS. 3A and 3B), citrullinated peptides (FIGS. 3C and 3D) and homocitrullinated peptides (FIGS. 3E and 3F) for RA samples (FIGS. 3A, 3C, and 3E) and control samples (FIGS. 3B, 3D, and 3F). Peptides are organized by their chromosomal locations and the height of the bar indicates the proportion of samples that contains significant antibody reactivity as detected on the peptide array.

[0047] FIG. 4 is a heatmap of log-transformed array signals derived from the array. Peptides are organized in rows and serum samples organized in columns. Sample condition is indicated under the dendrogram (black—control and white—RA) and CCP2 status is overlaid onto the sample condition (+/−indicate CCP2 status). Heatmaps are trellized also by native peptides (Native)—left, citrullinated peptides (Citrullinated)—middle, and homocitrullinated peptides (Homocitrullinated)—right.

[0048] FIGS. 5A and 5B shows a side-by-side comparison between fluorescence signal derived from array (FIG. 5A) and the signal histogram obtained using a nanoliter-scale immunoassay system (FIG. 5B) for 8 representative serum samples (4 controls and 4 RA) for protein PATE4. In FIG. 5A, signal derived from native peptides (Native) is shown in the first and third columns, whereas signal derived from citrullinated peptides (Citrullinated) is shown in the second and fourth columns. Individual serum samples are organized in rows, with the left two columns representing control serum sample data and the right two columns representing RA serum samples data. The epitope that went onto validation studies is indicated by shading centered at position 30, and had the sequence CNTCIYTEGWKCMAG-R/cit-GTCIAKENELCS (SEQ ID NO: 1), where R/cit indicates the use of either arginine (R) or citrulline (cit) at the indicated position. FIG. 5B shows signal histograms generated using the nanoliter-scale immunoassay system organized in the same way as that of array signal. With reference to the x-y-z coordinate system (bottom left), the x-axis indicates radius in μm (ranging from 0 to 900), the y-axis indicates angle in μm (ranging from 100 to 600), and the z-axis indicates intensity in relative units (ranging from 0 to 1).

[0049] FIGS. 6A and 6B illustrate the performance of an 8-epitope RA diagnostic classifier on the nanoliter-scale immunoassay system (see also Table 1). Epitopes (V1, V3, V5, V17, V19, V27, V28 and V29) are organized in rows and samples in columns. Filled squares indicate positivity and empty squares indicate negativity for the specific epitope. Sample conditions are indicated above the plots (control vs. RA). CCP2 status of the serum samples are indicated by +/−. FIG. 6A shows the initial expanded cohort of 92 patients (29 controls and 63 RA). FIG. 6B shows the independent validation cohort of 181 patients (54 controls and 127 RA).

[0050] FIG. 7 is a plot illustrating the proportion of probes with significant reactivity by condition (CCP2 negative [−] RA, CCP2 positive [+] RA, and control) organized by substitution categories (i.e., native, citrullinated and homocitrullinated). Each point represents a specific sample.

### DETAILED DESCRIPTION

### I. Definitions

[0051] In this application, unless otherwise clear from context, (i) the term “a” may be understood to mean “at least one”; (ii) the term “or” may be understood to mean “and/or”; (iii) the terms “comprising” and “including” may be understood to encompass itemized components or steps whether presented by themselves or together with one or more additional components or steps; and (iv) the terms “about” and “approximately” may be understood to permit standard variation as would be understood by those of ordinary skill in the art; and (v) where ranges are provided, endpoints are included.

[0052] Abinome: As used herein, the term “Abinome” refers to antibody repertoire observed against the annotated proteome or antibody reactome.

[0053] Approximately: As used herein, the term “approximately” or “about,” as applied to one or more values of interest, refers to a value that is similar to a stated reference value. In certain embodiments, the term “approximately” or “about” refers to a range of values that fall within 25%, 20%, 19%, 18%, 17%, 16%, 15%, 14%, 13%, 12%, 11%, 10%, 9%, 8%, 7%, 6%, 5%, 4%, 3%, 2%, 1%, or less in either direction (greater than or less than) of the stated reference value unless otherwise stated or otherwise evident from the context (except where such number would exceed 100% of a possible value).

[0054] Associated with: Two events or entities are “associated” with one another, as that term is used herein, if the presence, level, and/or form of one is correlated with that of the other. For example, a particular entity (e.g., polypeptide, genetic signature, metabolite, etc.) is considered to be associated with a particular disease, disorder, or condition, if its presence, level and/or form correlates with incidence of and/or susceptibility to the disease, disorder, or condition (e.g., across a relevant population). In some embodiments, two or more entities are physically “associated” with one another if they interact, directly or indirectly, so that they are and/or remain in physical proximity with one another. In some embodiments, two or more entities that are physically associated with one another are covalently linked to one another; in some embodiments, two or more entities that are physically associated with one another are not covalently linked to one another but are non-covalently associated, for example by means of hydrogen bonds, van der Waals interaction, hydrophobic interactions, magnetism, and combinations thereof.

[0055] Biological Sample: As used herein, the term “biological sample” typically refers to a sample obtained or derived from a biological source (e.g., a tissue or organism or cell culture) of interest, as described herein. In some embodiments, a source of interest comprises or consists of an organism, such as an animal or human. In some embodiments, a biological sample comprises or consists of biological tissue or fluid. In some embodiments, a biological sample may be or comprise bone marrow; blood; blood cells; ascites; tissue or fine needle biopsy samples; cell-containing body fluids; free floating nucleic acids; sputum; saliva; urine; cerebrospinal fluid, peritoneal fluid; pleural fluid; feces; lymph; gynecological fluids; skin swabs; vaginal swabs; oral swabs; nasal swabs; washings or lavages such as a ductal lavages or bronchoalveolar lavages; aspirates; scrapings; bone marrow specimens; tissue biopsy specimens; surgical specimens; other body fluids, secretions, and/or excretions; and/or cells therefrom, etc. In some embodiments, a biological sample comprises or consists of cells obtained from an individual. In some embodiments, obtained cells are or include cells from an individual from whom the sample is obtained. In some embodiments, a sample is a “primary sample” obtained directly from a source of interest by any appropriate means. For example, in some embodiments, a primary biological sample is obtained by methods selected from the group consisting of biopsy (e.g., fine needle aspiration or tissue biopsy), surgery, collection of body fluid (e.g., blood, lymph, feces etc.), etc. In some embodiments, as will be clear from context, the term “sample” refers to a preparation that is obtained by processing (e.g., by removing one or more components of and/or by adding one or more agents to) a primary sample. For example, filtering using a semi-permeable membrane. Such a “processed sample” may comprise, for example nucleic acids or proteins extracted from a sample or obtained by subjecting a primary sample to techniques such as amplification or reverse transcription of mRNA, isolation and/or purification of certain components, etc.

[0056] Citrullinated: As used herein, the term “Citrullinated” refers to a peptide or protein in which each arginine residue is replaced with a citrulline residue.

[0057] Citrullinome: As used herein, the term “Citrullinome” refers to antibody repertoire observed against citrullinated peptides from the annotated proteome, where arginine is substituted to citrulline.

[0058] Classifier: As used herein, the term “Classifier” refers to a tool for distinguishing the identity of one or more samples and assigning the identified samples to one or more categories. More generally, a classifier is useful for identifying to which of a set of categories (sub-populations) a new observation belongs, on the basis of a training set of data containing observations (or instances) whose category membership is known. Accordingly, a classifier can encompass predictive models, algorithms, charts, look-up tables, etc., that enable a new observation to be categorized. A classifier can assign observations to binary categories such as yes/no, healthy/diseased, present/absent, and the like. Alternatively (or in addition), a classifier can assign observations to a broader set of categories, such as a set of different types [type 1, type 2, type 3, . . . , type i], a set of different disease states [healthy, disease A, disease B, . . . , disease Z], a set of response predictions for different treatment options [non-responder, option A responder, option B responder, . . . , option Z responder], a set of treatment options [no treatment, treatment A, treatment B, . . . , treatment Z], the like, and combinations thereof.

[0059] Comprising: A composition or method described herein as “comprising” one or more named elements or steps is open-ended, meaning that the named elements or steps are essential, but other elements or steps may be added within the scope of the composition or method. It is to be understood that composition or method described as “comprising” (or which “comprises”) one or more named elements or steps also describes the corresponding, more limited composition or method “consisting essentially of” (or which “consists essentially of”) the same named elements or steps, meaning that the composition or method includes the named essential elements or steps and may also include additional elements or steps that do not materially affect the basic and novel characteristic(s) of the composition or method. It is also understood that any composition or method described herein as “comprising” or “consisting essentially of” one or more named elements or steps also describes the corresponding, more limited, and closed-ended composition or method “consisting of” (or “consists of”) the named elements or steps to the exclusion of any other unnamed element or step. In any composition or method disclosed herein, known or disclosed equivalents of any named essential element or step may be substituted for that element or step.

[0060] Designed: As used herein, the term “designed” refers to an agent (i) whose structure is or was selected by the hand of man; (ii) that is produced by a process requiring the hand of man; and/or (iii) that is distinct from natural substances and other known agents.

[0061] Determine: Those of ordinary skill in the art, reading the present specification, will appreciate that “determining” can utilize or be accomplished through use of any of a variety of techniques available to those skilled in the art, including for example specific techniques explicitly referred to herein. In some embodiments, determining involves manipulation of a physical sample. In some embodiments, determining involves consideration and/or manipulation of data or information, for example utilizing a computer or other processing unit adapted to perform a relevant analysis. In some embodiments, determining involves receiving relevant information and/or materials from a source. In some embodiments, determining involves comparing one or more features of a sample or entity to a comparable reference.

[0062] Feature: As used herein, the term “Feature” refers to an element of a predictive model (e.g., a classifier) that distinguishes the identity of one or more samples and assigns the samples into one or more categories. The term “feature” may be used interchangeably with the term “predictor” in the context of a statistical model.

[0063] Homocitrullinated: As used herein, the term “Homocitrullinated” refers to a peptide or protein in which each lysine residue is replaced with a homocitrulline residue.

[0064] Homocitrullinome: As used herein, the term “Homocitrullinome” refers to antibody repertoire observed against homocitrullinated peptides from the annotated proteome, where lysine is substituted to homocitrulline.

[0065] Identity: As used herein, the term “identity” refers to the overall relatedness between polymeric molecules, e.g., between nucleic acid molecules (e.g., DNA molecules and/or RNA molecules) and/or between polypeptide molecules. In some embodiments, polymeric molecules are considered to be “substantially identical” to one another if their sequences are at least 25%, 30%, 35%, 40%, 45%, 50%, 55%, 60%, 65%, 70%, 75%, 80%, 85%, 90%, 95%, or 99% identical. Calculation of the percent identity of two nucleic acid or polypeptide sequences, for example, can be performed by aligning the two sequences for optimal comparison purposes (e.g., gaps can be introduced in one or both of a first and a second sequences for optimal alignment and non-identical sequences can be disregarded for comparison purposes). In certain embodiments, the length of a sequence aligned for comparison purposes is at least 30%, at least 40%, at least 50%, at least 60%, at least 70%, at least 80%, at least 90%, at least 95%, or substantially 100% of the length of a reference sequence. The nucleotides at corresponding positions are then compared. When a position in the first sequence is occupied by the same residue (e.g., nucleotide or amino acid) as the corresponding position in the second sequence, then the molecules are identical at that position. The percent identity between the two sequences is a function of the number of identical positions shared by the sequences, taking into account the number of gaps, and the length of each gap, which needs to be introduced for optimal alignment of the two sequences. The comparison of sequences and determination of percent identity between two sequences can be accomplished using a mathematical algorithm. For example, the percent identity between two nucleotide sequences can be determined using the algorithm of Meyers and Miller (CABIOS, 1989, 4: 11-17), which has been incorporated into the ALIGN program (version 2.0). In some exemplary embodiments, nucleic acid sequence comparisons made with the ALIGN program use a PAM120 weight residue table, a gap length penalty of 12 and a gap penalty of 4. The percent identity between two nucleotide sequences can, alternatively, be determined using the GAP program in the GCG software package using an NWSgapdna.CMP matrix.

[0066] Sample: As used herein, the term “sample” refers to a substance that is or contains a composition of interest for qualitative and or quantitative assessment. In some embodiments, a sample is a biological sample (i.e., comes from a living thing (e.g., cell or organism). In some embodiments, a sample is from a geological, aquatic, astronomical, or agricultural source. In some embodiments, a source of interest comprises or consists of an organism, such as an animal or human. In some embodiments, a sample for forensic analysis is or comprises biological tissue, biological fluid, organic or non-organic matter such as, e.g., clothing, dirt, plastic, water. In some embodiments, an agricultural sample, comprises or consists of organic matter such as leaves, petals, bark, wood, seeds, plants, fruit, etc.

[0067] Substantially: As used herein, the term “substantially” refers to the qualitative condition of exhibiting total or near-total extent or degree of a characteristic or property of interest. One of ordinary skill in the biological arts will understand that biological and chemical phenomena rarely, if ever, go to completion and/or proceed to completeness or achieve or avoid an absolute result. The term “substantially” is therefore used herein to capture the potential lack of completeness inherent in many biological and chemical phenomena.

[0068] Synthetic: As used herein, the word “synthetic” means produced by the hand of man, and therefore in a form that does not exist in nature, either because it has a structure that does not exist in nature, or because it is either associated with one or more other components, with which it is not associated in nature, or not associated with one or more other components with which it is associated in nature.

[0069] Synthetic Peptide: As used herein, the term “synthetic peptide” refers to a peptide that differs from a naturally occurring peptide at one or more amino acid positions. In one aspect, a synthetic peptide can be differentiated from both a wild-type peptide and a mutant or other naturally occurring peptide. For example, a wild-type peptide can consist of a peptide sequence defining at least a portion of a wild-type protein sequence. In some cases, the wild-type protein may be known to occur naturally in a mutant form. For example, in certain autoimmune diseases, selected proteins are observed to include one or more citrulline residues in place of arginine residues. Notably, this citrullination is known to occur in nature. In this case, an example mutant peptide can consist of a peptide sequence defining at least a portion of the citrullinated protein sequence. However, the mutant peptide including the one or more citrulline residues can still be considered to be a naturally occurring peptide. By contrast, a synthetic peptide will differ from a wild-type peptide, a mutant peptide, or another naturally occurring peptide sequence defining at least a portion of a naturally occurring protein sequence. In one example, a synthetic peptide can include one or more amino acid substitutions, deletions, insertions, other like modifications, or a combination thereof, where the aforementioned modifications are not observed in a naturally occurring form of the protein sequence to which the peptide corresponds. For example, a synthetic peptide can include one or more citrulline residues in place of arginine residues, where the citrullinated arginine is not observer to occur in nature, either as a wild-type or mutant peptide.

[0070] Variant: As used herein, the term “variant” refers to an entity that shows significant structural identity with a reference entity but differs structurally from the reference entity in the presence or level of one or more chemical moieties as compared with the reference entity. In many embodiments, a variant also differs functionally from its reference entity. In general, whether a particular entity is properly considered to be a “variant” of a reference entity is based on its degree of structural identity with the reference entity. As will be appreciated by those skilled in the art, any biological or chemical reference entity has certain characteristic structural elements. A variant, by definition, is a distinct chemical entity that shares one or more such characteristic structural elements. To give but a few examples, a small molecule may have a characteristic core structural element (e.g., a macrocycle core) and/or one or more characteristic pendent moieties so that a variant of the small molecule is one that shares the core structural element and the characteristic pendent moieties but differs in other pendent moieties and/or in types of bonds present (single vs double, E vs Z, etc.) within the core, a polypeptide may have a characteristic sequence element comprised of a plurality of amino acids having designated positions relative to one another in linear or three-dimensional space and/or contributing to a particular biological function, a nucleic acid may have a characteristic sequence element comprised of a plurality of nucleotide residues having designated positions relative to another in linear or three-dimensional space. For example, a variant polypeptide may differ from a reference polypeptide as a result of one or more differences in amino acid sequence and/or one or more differences in chemical moieties (e.g., carbohydrates, lipids, etc.) covalently attached to the polypeptide backbone. In some embodiments, a variant polypeptide shows an overall sequence identity with a reference polypeptide that is at least 85%, 86%, 87%, 88%, 89%, 90%, 91%, 92%, 93%, 94%, 95%, 96%, 97%, or 99%. Alternatively, or additionally, in some embodiments, a variant polypeptide does not share at least one characteristic sequence element with a reference polypeptide. In some embodiments, the reference polypeptide has one or more biological activities. In some embodiments, a variant polypeptide shares one or more of the biological activities of the reference polypeptide. In some embodiments, a variant polypeptide lacks one or more of the biological activities of the reference polypeptide. In some embodiments, a variant polypeptide shows a reduced level of one or more biological activities as compared with the reference polypeptide. In many embodiments, a polypeptide of interest is considered to be a “variant” of a parent or reference polypeptide if the polypeptide of interest has an amino acid sequence that is identical to that of the parent but for a small number of sequence alterations at particular positions. Typically, fewer than 20%, 15%, 10%, 9%, 8%, 7%, 6%, 5%, 4%, 3%, 2% of the residues in the variant are substituted as compared with the parent. In some embodiments, a variant has 10, 9, 8, 7, 6, 5, 4, 3, 2, or 1 substituted residue as compared with a parent. Often, a variant has a very small number (e.g., fewer than 5, 4, 3, 2, or 1) number of substituted functional residues (i.e., residues that participate in a particular biological activity). Furthermore, a variant typically has not more than 5, 4, 3, 2, or 1 additions or deletions, and often has no additions or deletions, as compared with the parent. Moreover, any additions or deletions are typically fewer than about 25, about 20, about 19, about 18, about 17, about 16, about 15, about 14, about 13, about 10, about 9, about 8, about 7, about 6, and commonly are fewer than about 5, about 4, about 3, or about 2 residues. In some embodiments, a variant may also have one or more functional defects and/or may otherwise be considered a “mutant”. In some embodiments, the parent or reference polypeptide is one found in nature. As will be understood by those of ordinary skill in the art, a plurality of variants of a particular polypeptide of interest may commonly be found in nature, particularly when the polypeptide of interest is an infectious agent polypeptide.

### II. Detailed Description of Certain Embodiments

[0071] As also discussed above, in various situations it may be useful to provide a method for accurately diagnosing a subject for a particular condition, disease, or the like. Depending on the nature of the diagnostic, the method or test can enable early detection, potentially resulting in improved opportunities to plan for treatment and the like. However, a given affliction may be difficult to accurately diagnose, especially early on, when detectable symptoms are restricted to changes at the molecular level (e.g., genomic mutations, protein aggregation, changes in expression levels of nucleic acids or proteins, and the like) that may not have manifested in more readily detectable ways. For example, Alzheimer's disease (AD) is a chronic neurodegenerative disease that can include such outward manifestations as memory loss, confusion, and decreased or poor judgment. However, while the cause of AD is poorly understood, biochemical changes including protein misfolding are hypothesized to contribute to the progression of the disease. Accordingly, examination of brain tissue is presently needed for a more definite diagnosis. That is, diagnosis of a disease, such as AD, may benefit from a diagnostic that focuses on features such as peptides, proteins, or nucleic acids as opposed to behavioral characteristics or other outward manifestations that can be subjective or difficult to detect early in the progression of the condition.

[0072] In another example, it may be useful to provide a method for accurately forecasting the probable course of a disease or determining whether a subject may respond to a given course of treatment (i.e., a prognostic or predictive method). More than one treatment method is often available for use; however, if no predictive test is available to indicate which treatment or treatments will be effective, it may be necessary to rely on trial and error, attempting multiple different treatments either alone or in combination to determine which treatments will be effective. Ultimately, in the absence of either or both of a diagnostic and prognostic method or test, several challenges may arise in the diagnosis and treatment of a subject.

[0073] These and other challenges may be overcome with a system and method for the design and implementation of a peptide classifier. In one aspect, a classifier can be implemented to solve the problem of categorizing a subject within a population of subjects. For example, a classifier may assign a subject (or observation about that subject) to a particular category or sub-population based on a training set of data containing information about one or more different subjects (or observations) within the population. An example would be assigning a diagnosis to a given subject as determined by observed characteristics of the subject.

[0074] The present disclosure is, at least in part, based on the surprising discovery that a set of one or more peptides, including non-naturally occurring variants of known peptide sequences can be used to prepare one or both of a diagnostic classifier and a prognostic classifier for categorizing an observation or aspect of a group of subjects. For example, an observation about the interaction of the peptides with a serum sample collected from the subject can be used to diagnose the subject for a given condition, predict which treatment or treatments may be effective for the subject, the like, and combinations thereof.

[0075] In applying the above approach, the inventors have discovered a plurality of peptide features that are useful for identifying biomarkers associated with RA, including a number of peptides features that have not previously been linked to RA. Accordingly, the present disclosure provides for novel classifiers useful for diagnosing RA. Moreover, the present disclosure provides for general methods of preparing classifiers useful for diagnosing RA from the disclosed list of peptide features (SEQ ID NOS: 1-8861).

[0076] In one aspect, a peptide classifier according to the present disclosure can include wild-type, mutant, or synthetic peptides that are differentiable from a traditional classifier for querying a biomarker. A biomarker can be defined as a naturally occurring, biological element (e.g., a nucleic acid, a protein, a small molecule, an antibody, or the like) that can be detected in the blood, serum, urine, or another fluid of a subject. In one aspect, the biomarker may be produced by a foreign (non-native) or mutant (native) element in the subject (e.g., a tumor, a virus, a parasite, or the like) or in response to the presence of the native or non-native element. In general, querying of biomarkers can allow for early detection of a condition, confirmation of a diagnosis, predicting an outcome or making a prognosis, monitoring treatment response, and the like. Whereas some classifiers can include one or more elements for querying biomarkers such as normal or mutant peptides or proteins, the synthetic peptides of the present disclosure cannot be properly equated to these normal or mutant peptides or proteins. In one aspect, the synthetic peptides of the present disclosure may be variants of normal (wild-type) or mutant versions of peptides or proteins that may exist in a given subject or may be associated with a given condition. While the native peptides (wild-type or mutant) may be predicted to be useful for querying biomarkers as they may be observed to interact with those biomarkers in nature, the synthetic peptides of the present disclosure are non-naturally occurring, designed sequences that are absent in the curated proteome. However, these synthetic peptides may contribute to a more sensitive and/or specific classifier for querying those same biomarkers. Without being limited by any particular theory, it is hypothesized that the synthetic peptides of the present disclosure may adopt a conformation that it is better suited to interact with or be bound by a portion of a serum antibody or another biomarker relative to naturally occurring peptide sequences. Importantly, the synthetic peptides of the present disclosure can be capable of detecting or otherwise interacting with one or more biomarkers derived from a subject as the basis of a diagnostic or prognostic/predictive synthetic classifier.

[0077] In one aspect, the present disclosure leverages the surprising discovery that a synthetic or variant peptide sequence can be used to provide a classifier, as one would not necessarily expect to find non-naturally occurring peptides that can be used as a classifier to discriminate between naturally occurring biomarkers. In light of this result, the present disclosure provides for systems and methods to design peptide-based probes for detection of biomarkers that may be useful in one or more of predictive, prognostic, diagnostic, pharmacodynamic, and/or efficacy-response applications. As further defined herein, a biomarker is a measurable substance in an organism whose presence is indicative of some phenomenon such as disease, infection, or environmental exposure. Methods according to the present disclosure for detection of one or more biomarkers include i) systematic screening of known peptide targets, and ii) derivatization of the aforementioned peptides, including systematic mutation of known sequences with both natural and non-natural amino acids, cyclization of peptides and their mutant counterparts, or a combination thereof to provide a plurality of synthetic variant peptides. Derivatization is based on the ability to distinguish between sub-groups of biomarker populations (e.g., drug responders vs. non-responders, or diseased vs. control/healthy populations) in a disease area.

[0078] In one aspect, the present disclosure overcomes the challenge of having to rely solely on screening to identify peptide candidates and using them as probes to query biomarkers. Existing solutions rely on methods such as phage or mRNA display for natural amino acids substitution. As for non-natural amino acids such as citrulline and homocitrulline, work is ongoing to overcome the challenge of incorporating non-natural amino acids into various display technologies (e.g., mRNA display, phage display, etc.) via genetic code expansion or genetic code reprogramming. By contrast, embodiments of the present disclosure involve systematically mutating these peptide candidates to find variant peptide sequences (i.e., synthetic peptides) that perform better than the original, naturally occurring candidate peptides as probes for querying biomarkers. These variant peptide sequences are unlikely to be found in the human proteome (natural vs. non-natural), and are at least unknown (i.e., non-naturally occurring) variants of the portions of the proteins from which they are derived. In one aspect, the peptides of the present disclosure can be implemented in detection schemes for the accurate diagnosis of a subject with a given condition as well as for informing which treatments may be effective for a given subject.

[0079] Turning to FIG. 1, an embodiment of a method 100 for identifying a peptide classifier includes a step 102 of identifying and synthesizing a first plurality of peptides. At least a portion of the first plurality of peptides can define at least one naturally occurring amino acid sequence. For example, the peptides can be tiled at a given amino acid resolution (see FIG. 2) along the length of an entire partial or full-length protein sequence of interest. In some embodiments, the peptides can have amino acid sequences that collectively represent the entire human proteome or another proteome of interest. Moreover, the peptides can have amino acid sequences that collectively represent a modified or variant version of at least a portion of the entire human proteome or another proteome of interest. For example, the peptides can be partially or completely citrullinated and/or homocitrullinated relative to the native or wild-type sequence.

[0080] A next step 104 of the method 100 includes contacting at least a first sample and a second sample with a first plurality of peptides. The first sample is derived from a first group of a cohort, and the second sample derived from a second group of the cohort. The first group is different from the second group. The cohort is generally a group of subjects with a common defining characteristic. For example, the cohort can be a group of subjects, where a portion of the subjects have been diagnosed with (or suspected of) a particular condition or disease. More particularly, the first group within the cohort can be a group of healthy (control) subjects and the second group within the cohort can be a group of subjects known or suspected to have a particular condition, disease, diagnosis, or the like.

[0081] Notably, samples can be derived from two or more groups within a cohort. As described in the Examples below, in some embodiments, a cohort can include three or more groups. Example groups can include at least a control or healthy subject group, a group of subjects diagnosed with a particular condition where the subjects responded to a particular treatment, and a group of subjects diagnosed with the same particular condition where the subjects did not respond to the particular treatment. Example groups can further include a first group of subjects diagnosed with a first condition and a second group of subjects diagnosed with a second condition different from the first condition. In one aspect, the first and second conditions may be related, such as different types of arthritis (e.g., RA and osteoarthritis) or different types of cancer. Accordingly, the method 100 can be used to identify a peptide classifier for distinguishing between samples associated with the first condition and the second condition. Moreover, more than a single sample may be tested from each of the groups within the cohort. For example, at least 2, 3, 4, 5, 6, 7, 8, 9, 10, 15, 20, 30, 50, 100, 1,000, 10,000, or more samples can be obtained for each group within a cohort. Each of the samples from a selected group of the cohort can be contacted individually or in combination with one or more peptides as described below. In one aspect, a sample can be a blood sample, a serum sample, a buccal swab, a urine sample, a stool sample, a tissue sample, the like, or combinations thereof. The single sample will generally be collected from an individual subject. However, in some embodiments, it may be useful to pool one or more samples to provide a single, combined sample.

[0082] A next step 106 of the method 100 includes selecting a first subset of peptides from the first plurality of peptides. The first subset of peptides can be candidate peptides that can at least partially classify the first and second samples from the first and second groups. Having identified a plurality of peptides in the step 106, the method 100 can optionally proceed to the step 114 of defining a peptide classifier with the identified peptides from the first plurality of peptides. Alternatively, or in addition, a next step 108 of the method 100 includes identifying and synthesizing a second plurality of peptides. At least a portion of the second plurality of peptides can define the sequences of the first subset of peptides and a plurality of variant peptides of the first subset of peptides. For example, the plurality of variant peptides can include, for each one of the first subset of peptides, a variant peptide having at least one of a substitution, a deletion, an insertion, an extension, and a modification. In one aspect, the plurality of variant peptides can include one or more synthetic peptides as defined herein.

[0083] A next step 110 of the method 100 can include contacting at least the first sample and the second sample (or samples comparable thereto) with a second plurality of peptides. Thereafter, a next step 112 of the method 100 can include identifying or otherwise selecting a second subset of peptides from the second plurality of peptides. The second subset of peptides can include at least one of the plurality of variant peptides. In a next step 114 of the method 100, a peptide classifier can be defined including at least one of the second subset of peptides. The peptide classifier can distinguish between a sample derived from the first group and a sample derived from the second group. Moreover, the peptide classifier can include one or more synthetic peptides identified according to the method 100, thereby defining a synthetic classifier.

[0084] Notably, the embodiments of the method 100 according to the present disclosure can include one or more additional steps or omit one or more of the illustrated steps of the method 100. For example, it may be possible to identify a subset of peptides from which a plurality of variant peptides can be prepared without performing the initial steps of the method 100. That is, it may be possible to omit the steps of identifying and synthesizing a first plurality of peptides, contacting the first plurality of peptides with the subject samples, and selecting the first subset of peptides based on the outcome of the first and second illustrated steps of the method 100 of identifying and contacting. Accordingly, the method 100 can begin with a step of identifying and synthesizing the second plurality of peptides. In general, the method 100 can be modified in any suitable way that still enables the outcome of defining a classifier, whether the resulting classifier is synthetic or otherwise. Yet other variations of the method 100 that fall within the scope of the present disclosure will be apparent from the additional examples and description included herein.

[0085] The inventors have discovered that aspects of the present disclosure can be applied to the identification of a peptide classifier for RA. Autoantibodies against citrullinated proteins are found in 64-89% of RA patients, with a specificity of 88-99%. While citrullinated vimentin, fibrin and histone have been implicated as targets of autoantibody reactivity, new targets, such as Tenascin-C, continue to be uncovered. To this end, an epitope-level characterization of autoantibodies from RA serum samples was performed using a peptide library including both native and modified peptides. In particular, the present disclosure provides, in part, for the first unbiased and comprehensive profiling of serum antibodies in RA serum samples against the entire human proteome, including the citrullinome and the homocitrullinome.

[0086] In identifying a peptide classifier for RA, peptide libraries were prepared comprising over 4.6M peptides representing the entire annotated human proteome from the UniProt database. A total of 20,246 proteins were represented as overlapping 16-mer peptides with a four amino acid tiling resolution (see FIG. 2). In addition to native peptides for autoantibody profiling, citrullinated and homocitrullinated peptides were also included on the array, substituting for each arginine and each lysine, respectively, providing a comprehensive screen against all possible epitopes. Notably, the peptide library also included peptides having a combination of citrullinated and non-citrullinated arginine positions, for example, in the case that a peptide sequences included two or more arginine positions. Immunoglobulin G (IgG) antibodies for 26 serum samples (8 controls and 18 RA samples) were profiled. Comprehensive antibody profiling resulted in the surprising discovery of many citrullinated peptides and proteins that have not been previously reported to be associated with RA.

[0087] Using information derived from peptide array studies, an 8-epitope RA diagnostic classifier was constructed and subsequently validated using a nanoliter-scale immunoassay system (GYROLAB XPLORE). A cohort of 92 samples (29 controls and 63 RA samples) was then evaluated on the nanoliter-scale immunoassay system with the RA diagnostic classifier obtaining a 96% specificity and a 92% sensitivity in performance. The classifier was further validated with an independent cohort of 181 serum samples (54 controls and 127 RA samples), yielding a 95% specificity and an 85% sensitivity in performance.

[0088] The present disclosure is believed to provide the first unbiased proteome level antibody profile for RA, which is defined herein as the “RA Abinome”. As has been previously characterized, antibodies against citrullinated epitopes are readily seen in RA serum samples and ACPA positive RA patients. The disclosed data shows how extensive antibody reactivity against the citrullinated proteome is and seems to occur throughout the proteome. Relative to ACPA reactivity, antibody reactivity against homocitrullinated epitopes (anti-CarP) was seen less frequently in this cohort, which is consistent with seminal reports by Shi et al. (Proc Natl Acad Sci USA. 2011; 108:17372-7). Interestingly, while anti-CarP antibody was observed in 4 out of 18 RA serum samples tested, these individuals also showed ACPA reactivity and did not constitute an anti-CarP positive and ACPA negative subgroup of RA patients. This is also consistent with Peccani et al. (Arthritis Res Ther. 2016; 18:276), where the majority of anti-CarP positive patients were also ACPA positive.

[0089] Gene Ontology (GO) term enrichment analysis was performed for significant reactivity for both RA and control groups. For autoantibody reactivity, there was no specific GO term enrichment unique to RA group over control (Table 1). For anti-CarP reactivity, only one molecular function GO term “actin filament binding” was found to be enriched. ACPA reactivity, on the other hand, had 33 biological processes, 50 cellular components and 51 molecular function GO terms that were enriched at a Benjamini-Hochberg corrected p-value of 0.05. While 50 cellular components GO terms were enriched, most top statistical hits were intracellular such cytoplasm and cytosol. This, coupled with the fact that no observable preference for extracellular peptides was seen in the RA Abinome by student t-test (p-value=0.75) is consistent with the idea that necrotic tissue is a significant source of antigens for citrullination by peptidyl arginine deaminases (PADs) within the RA synovium (Arthritis Res Ther. 2016; 18:239).

TABLE 1

| Epi- | UniProt | Protein | |
|---|---|---|---|
| tope | ID | Name | Peptide Sequence (N′ → C′) |
| V1 | P0C8F1 | PATE4 | CNTCIYTEGWKCMAG-Cit/R- |
| | | | GTCIAKENELCS (SEQ ID NO: 1) |
| V3 | Q9UMX5 | NENF | KGVVFDVTSGKEFYG-Cit/R- |
| | | | GAPYNALTGKDS (SEQ ID NO: 2) |
| V5 | Q9UMX5 | NENF | YKAKYPIVGYTA-Cit/R-Cit/R- |
| | | | ILNEDGSPNLDFKP (SEQ ID NO: 3) |
| V17 | Q8N967 | LRTM2 | MEWFSY-Cit/R-GG-Cit/R- |
| | | | LDQLACTLP (SEQ ID NO: 4) |
| V19 | O96014 | WNT11 | -hc/K-NE-hc/K-VGSHGTQDQCN- |
| | | | hc/K-TSNGSDSCDLM (SEQ ID NO: |
| | | | 5) |
| V27 | Q5T848 | GP158 | IYGLQPNLVPEF-Cit/R- |
| | | | GVMKVDINLQKVDID (SEQ ID NO: |
| | | | 6) |
| V28 | Q5H8C1 | FREM1 | VLEVPEFNGLSQAID-hc/K-NLLR |
| | | | (SEQ ID NO: 7) |
| V29 | O75443 | TECTA | DCPN-Cit/R-TCELGNG-Cit/R- |
| | | | ELCGCIE (SEQ ID NO: 8) |

Cit/R indicates peptide sequence positions where distinct peptides were prepared for each of citrulline (Cit) and arginine (R), while hc/K indicates peptide sequence positions where distinct peptides were prepared for each of homocitrulline (hc) and lysine (K).

[0090] Overall signal between the peptide array libraries and the nanoliter-scale immunoassay system were comparable even though differences were expected due to differences in surface chemistry between the two platforms. Peptide array signal exhibited higher dynamic range, as saturation effects were observed in the nanoliter-scale immunoassay system with epitopes with strong peptide array signal, coupled with regression coefficients being less than 1 in all epitopes used in validation. When comparing the signal log ratios of citrullinated and homocitrullinated peptides versus native peptides between the two platforms, regression coefficients of determination varied from 0.32 to 0.78, depending on the epitope.

[0091] Translating findings between immunoassays can be challenging as surface characteristics can impact the conformation of the epitopes and subsequent presentation and binding of antibodies against the cognate partners (J. R. Soc., Interface 2012, 9, 2688-2695). According the present disclosure, array signal was treated qualitatively in order to overcome the aforementioned challenge. When comparing qualitative calls between the two platforms, the overall concordance rate was 86.4% when all data was combined.

[0092] Whole proteome screening of linear epitopes has one specific shortcoming, namely, there is no assurance that short linear peptides can adopt native protein confirmation. The inventors have previously shown that linear peptides can adopt the necessary conformation needed for protein binding to occur (Scientific Reports. 7. 10.1038/s41598-017-12440-1). While there is much debate as to the relative proportion of human antibodies binding linear epitopes versus conformational/discontinuous epitopes (PLoS ONE 10:e0121673; Biomed Res Int 2014, 12), the present disclosure provides for a comprehensive, whole proteome screen of linear epitopes can be potentially informative for RA diagnosis. By mining the RA Abinome data from peptide arrays, candidate epitopes were screened using the nanoliter-scale immunoassay system with traditionally synthesized peptides to avoid potentially spurious findings that are peptide array specific. By combining eight epitopes, the overall diagnostic performance of the presently disclosed classifier was 95% specific and 92% sensitive on our initial 92-sample cohort. To provide context as to the percentage of RA samples that are ACPA positive, the CCP2 assay was performed on the 92-sample cohort. Overall, the tested RA samples were positive by CCP2 assay 68.3% of the time, while our controls were positive 3.4% of the time, yielding 96.6% specificity and 68.3% sensitivity. Notably, the 8-epitope diagnostic classifier according to the present disclosure outperforms the current gold standard for RA diagnostic blood test (i.e., the CCP2 assay) in terms of sensitivity while being comparable in terms of specificity. Finally, in order to assess the robustness of the presently disclosed 8-epitope classifier, the diagnostic performance was further validated with an independent, commercially purchased cohort of 181 patients. The validation performance was 95% specific and 85% sensitive.

[0093] As demonstrated by the presently disclosed 8-epitope diagnostic marker, it is evident that whole proteome profiling of linear epitopes has potential utility in revealing novel insights for disease prognosis and diagnosis of RA. It will therefore be appreciated that the aforementioned 8 epitope classifier (Table 1) is only one of many possible peptide classifiers that can be constructed from the peptide features identified with the peptide libraries described herein. In particular, Table 2 shows the number of different feature sets that can be selected from SEQ ID NOS: 1-8861 to define a classifier for RA as predicted by a machine learning algorithm. The algorithm begins with a seed feature and iteratively searches for features that maximally increases sensitivity while minimizing decreases in specificity in a greedy manner. The algorithm stops when either (a) sensitivity is perfect, (b) no additional features are found to be useful or (c) maximum number of features is reached. All classifiers that pass the specified sensitivity and specificity thresholds are returned to the user. The number of features used to construct each classifier ranged from 1 to 6, the sensitivity of each classifier ranged from 0.78 to 1.00, and the specificity of each classifier was constant at 1.00. The remaining columns of Table 2 list the resulting number of classifiers identified at each sensitivity/specificity combination using the machine learning algorithm for increasing numbers of unique features.

TABLE 2

| | | Number of Unique Features in Classifier | | | | | |
|---|---|---|---|---|---|---|---|
| Sensitivity | Specificity | 1 | 2 | 3 | 4 | 5 | 6 |
| 0.78 | 1.00 | 1 | 71 | 0 | 0 | 0 | 0 |
| 0.83 | 1.00 | 0 | 150 | 31 | 0 | 0 | 0 |
| 0.89 | 1.00 | 0 | 18 | 167 | 31 | 0 | 0 |
| 0.94 | 1.00 | 0 | 0 | 38 | 167 | 31 | 0 |
| 1.00 | 1.00 | 0 | 0 | 0 | 38 | 167 | 31 |

[0094] By way of example, for groups of 3 unique features selected from SEQ ID NOS: 1-8861 by the machine learning algorithm, no classifiers were constructed with a sensitivity of 0.78, 31 classifiers were constructed with a sensitivity of 0.83, 167 classifiers were constructed with a sensitivity of 0.89, 38 classifiers were constructed with a sensitivity of 0.94, and no classifiers were constructed with a sensitivity of 1.0. As stated above, each predicted 3-feature classifier had a specificity of 1.00. Notably, the machine learning algorithm identified a total of 236 different classifiers consisting of 6 or fewer unique features that had a predicted sensitivity and specificity of 1.00. Although not shown in Table 2, it will be appreciated that further classifiers including 7 or more features could be identified by the machine learning algorithm with a predicted sensitivity and specificity of 1.00.

### EXAMPLES

[0095] The following Examples are meant to be illustrative and are not intended to be limiting in any way.

### Example 1

[0096] To identify a peptide classifier for RA, whole proteome peptide libraries were designed using an array-format based on 20,246 protein sequences obtained from the Universal Protein Resource (UniProt) downloaded on Apr. 12, 2013 (Query: taxonomy: “Homo sapiens (Human) [9606]” keyword: “Complete proteome [KW-0181]” AND reviewed:yes). The sequences were tiled as overlapping 16-mer linear peptides at a four amino acid tiling interval (see FIG. 2). A peptide array design was then prepared by randomly distributing the resulting 16-mer linear peptide sequences across the surface of the array. In addition to native peptides for autoantibody profiling, citrullinated and homocitrullinated peptides were also included on the array, substituting for arginine and lysine, respectively. The total number of peptide probes present in the whole proteome array design was 2,014,531 native peptides, 1,363,951 at least partially citrullinated peptides, and 1,300,186 at least partially homocitrullinated peptides, for a total of 4,678,668 peptide probes.

[0097] Microarrays were synthesized with a MAS by light-directed solid-phase peptide synthesis using an amino-functionalized plastic support coupled with a 6-aminohexanoic acid linker and amino acid derivatives carrying a photosensitive 2-(2-nitrophenyl) propyloxycarbonyl (NPPOC) protection group. Amino acids (final concentration 20 mM) were pre-mixed for 5 min in N,N-Dimethylformamide (DMF) with N,N,N′,N′-Tetramethyl-O-(1H-benzotriazol-1-yl)uranium-hexafluorophosphate (HBTU; final concentration 20 mM) as an activator, 6-Chloro-1-hydroxybenzotriazole (6-Cl-HOBt; final concentration 20 mM) to suppress racemization, and N,N-Diisopropylethylamine (DIPEA; final concentration 31 mM) as base. Activated amino acids were then coupled to the array surface for 3 min. Following each coupling step, the microarray was washed with N-methyl-2-pyrrolidone (NMP), and site-specific cleavage of the NPPOC protection group was accomplished by irradiation of an image created by a Digital Micro-Mirror Device (HD 1080p resolution), projecting 365 nm wavelength light. Coupling cycles were repeated to synthesize the full in silico-generated peptide library. Prior to sample binding, final removal of side-chain protecting groups was performed in 95% trifluoroacetic acid (TFA), 0.5% Triispropylsilane (TIPS) for 30 min. Peptide array synthesis using a MAS is further described in U.S. Pat. No. 10,161,938 by Patel et al.

[0098] For processing and analysis of peptide arrays, arrays were incubated twice in methanol for 30 s and rinsed four times with reagent-grade water. Arrays were washed for 1 min in TBST (1×TBS, 0.05% Tween-20), washed twice for 1 min in TBS, and exposed to a final wash for 30 s in reagent-grade water. Slides were then spun dry in a microarray dryer.

[0099] Samples were diluted 1:100 in binding buffer (0.01M Tris-Cl, pH 7.4, 1% alkali-soluble casein, 0.05% Tween-20) and bound to arrays overnight at 4° C. After sample binding, the arrays were washed three times in wash buffer (1×TBS, 0.05% Tween-20), 10 min per wash. Primary sample binding was detected via ALEXA FLUOR 647-conjugated goat anti-human IgG secondary antibody diluted to 1:10,000 (final concentration 0.1 ng/μl) in secondary binding buffer (1×TBS, 1% alkali-soluble casein, 0.05% Tween-20). Arrays were incubated with secondary antibody for 3 h at room temperature and then washed three times in wash buffer (10 min per wash), 30 see in reagent-grade water and spun dry. Fluorescent signal of the secondary antibody was detected by scanning at 635 nm at 2 μm resolution and 15% PMT gain, using a microarray scanner.

[0100] Array data analyses were performed in the R statistical programming environment version 3.2.3 using a custom developed R package. Raw array signal intensities were spatially corrected via a 2-D loess smoother (Statistical Models in S, 2017, edited by T. J. Hastie) and background corrected by deconvolution (Bolstad 2004. Low Level Analysis of High-Density Oligonucleotide Array Data: Background, Normalization and Summarization). A one-sided Kolmogorov-Smirnov test was used to assess whether the signal within an 8-mer sliding window centered on a specific probe is above sampled background (Methods in Enzymology, 411, 270-282). A signal intensity exceeding 2¹² (or 4096 fluorescence units) with a sliding window significance of 0.05 was used to categorize significant antibody reactivity. An epitope is defined as two or more contiguous (including overlapping) probes with significant reactivity.

[0101] Hierarchical clustering was performed on log transformed array signal intensities using peptide probe intensities belonging to significant epitopes in 3 or more samples within the 26 serum samples profiled on the whole proteome array, using the R package ‘hclust’. Hierarchical clustering was performed separately for citrullinated, homocitrullinated, and native peptide probes.

[0102] Proteins with at least one significant epitope in either citrullinated, homocitrullinated, or native peptide probes were submitted for GO enrichment analysis via the DAVID Bioinformatics Resource 6.8. Enrichment of specific GO terms in ‘molecular functions’, ‘subcellular component’ and ‘binding proteins’ was done via a hypergeometric test against all annotated human proteins. P-values were corrected using Benjamini-Hochberg and GO terms with P values less than 0.05 are listed in supplemental data (Nature Protoc. 2009; 4(1):44-57; Nucleic Acids Res. 2009; 37(1):1-13). All data graphics were made using the R package “ggplot2” and any additional statistical analyses were conducted in R.

[0103] For further analysis of peptides with the nanoliter-scale immunoassay system, peptides were prepared using traditional solid phases synthesis with Fmoc and Boc chemistry and a solid support resin. Peptides were further synthesized with C-terminal amidation and biotinylation via the side chain of the C-terminal lysine. Peptides were then assayed using the nanoliter-scale immunoassay platform (GYROLAB XPLORE). The platform automates finely controlled immunoassays in identical microfluidic channels using highly sensitive, laser-induced fluorescence (LIF) detection. The 3-step assay was carried out as per manufacturer's instructions. During the Capture phase of the 3-step assay, 1 μM of peptide in 1× phosphate buffered saline+Tween (PBST) was used. Serum samples were diluted to 10% in 1× HNmax buffer. The ALEXA FLUOR 647 conjugated goat anti-human Fc secondary antibody (1 mg/mL stock) was diluted to 3.6 μg/mL in 1× Rexxip F buffer. Quantification of signal intensity was obtained by GYROLAB EVALUATOR software using signal at the 5% PMT scan setting.

[0104] After signal extraction, signal specific to each citrullinated or homocitrullinated peptide was converted to a ratio against the corresponding native peptide, which was termed “signal-to-noise” ratio. The signal from a no peptide control was used for peptide probes with signal not specific to citrullinated, homocitrullinated, or native peptides.

[0105] To carry out CCP2 assays, a CCP2 IgG ELISA Kit was purchased from a commercial manufacturer (ABNOVA). The CCP2 assay was conducted as per the manufacturer's instructions with the exception that after adding chromogenic substrate solution, the reaction was stopped after 5 min. The resulting colorimetric intensity was measured at 450 nm using a microplate reader.

[0106] The comprehensive human proteome profiling of antibody reactivity against the native, citrullinated, and homocitrullinated linear peptide probes represents the first unbiased portrait of the RA serum antibody repertoire, which is here termed the RA Abinome. Antibody reactivity against citrullinated peptide probes was detected as described herein at high frequency within the cohort of 18 RA serum samples as attested by the overall heights of the bars throughout the proteome when comparing between the RA group vs. the control group (FIGS. 3A-3F). A total of 8,981 citrullinated peptide probes (0.66% of total citrullinated probes) had significant reactivity present at a frequency of greater than or equal to 10 out of 18 RA samples and potentially represent elements for use in a diagnostic classifier comparable to current CCP2 based diagnostic tests (Arthritis Res Ther 2017; 19:115). This is in contrast to antibody reactivity for native and homocitrullinated peptide probes, which was observed at a substantially lower frequency. Only 4 native peptide probes (SLKRLTDKEADEYYMR (SEQ ID NO: 9), LTDKEADEYYMRRRHL (SEQ ID NO: 10), SQSSPEFKGSLASLSD (SEQ ID NO: 11), and PEFKGSLASLSDSLGV (SEQ ID NO: 12)) and 2 homocitrullinated peptide probes (SQSSPEFJGSLASLSD (SEQ ID NO: 13) and PEFJGSLASLSDSLGV (SEQ ID NO: 14)) showed significant reactivity at a frequency of greater or equal to 10 out of 18 RA samples (SEQ ID NOS: 1-8861). When compared to the 8 control serum samples that were also profiled, the mean number of peptide probes with reactivity between groups were not statistically different for native and homocitrullinated peptide probes (p-values 0.997 and 0.997 respectively). On the other hand, a difference was detected for citrullinated peptide probes (p-value 0.020, FIG. 7 and Table 3).

TABLE 3

| | Citrullinated | | Homocitrullinated | | Native | |
|---|---|---|---|---|---|---|
| | | Std. | | Std. | | Std. |
| | Avg. | Dev. | Avg. | Dev. | Avg. | Dev. |
| CCP positive | 80955.2 | 113707.1 | 1560.2 | 2679.3 | 1023.7 | 831.9 |
| RA | | | | | | |
| CCP negative | 1337.8 | 175.6 | 119.8 | 83.2 | 1095.5 | 772.4 |
| RA | | | | | | |
| Control | 531.0 | 244.5 | 152.0 | 67.7 | 912.0 | 445.9 |

[0107] Table 3 shows the average number of significant probes detected by condition organized by substitution category as well as the standard deviation. When comparing between RA (both CCP positive and CCP negative) and controls, the mean number of peptide probes with reactivity between groups were significant for citrullinated peptide probes (p-value 0.020 by homoscedastic t-test) and not significant in native and homocitrullinated peptide probes (p-values 0.997 and 0.997).

[0108] Interestingly, antibody reactivity against native peptide probes was observed for control samples, which is consistent with reports by Nagele et al. (PLoS One 2013; 8:e60726). Surprisingly, reactivity against citrullinated and homocitrullinated peptide probes was also observed for control samples and was not restricted to specific individuals. In fact, specific citrullinated and homocitrullinated peptide probes showed reactivity in up to 50% of control individuals but were absent in RA individuals.

[0109] In addition to detecting antibody reactivity against citrullinated peptide probes in previously reported antigens such as filaggrin and fibrin, the majority of antibody reactivity detected in RA serum samples against the citrullinated proteome has not been previously reported to be associated with RA (Table 4). Citrullinated peptide probes as listed by UniProt identifier (UniProt) within 340 proteins had antibody reactivity at a frequency (#) greater or equal to 10 out of 18 in RA samples in this cohort (Table 5). The top 25 proteins with the highest frequency of reactivity within this RA cohort are presented in Table 6.

TABLE 4
Frequency of reactivity to commonly known antigens

| | | Proportion of RA samples | | |
|---|---|---|---|---|
| | | with Reactivity | | |
| Antigen | UniProt | AA | C | H |
| Filaggrin | P20930 | 0.06 | 0.61 | 0.06 |
| Fibrin | | | | |
| Fibrinogen alpha | P02671 | 0.00 | 0.61 | 0.06 |
| chain | | | | |
| Fibrinogen beta chain | P02675 | 0.00 | 0.56 | 0.06 |
| Fibrinogen gamma | P02679 | 0.00 | 0.17 | 0.00 |
| chain | | | | |
| BiP | P11021 | 0.00 | 0.44 | 0.06 |
| RA33 | P22626 | 0.17 | 0.67 | 0.00 |
| Vimentin | P08670 | 0.06 | 0.39 | 0.00 |
| alpha-enolase | P06733 | 0.00 | 0.33 | 0.00 |
| PAD4 | Q9UM07 | 0.00 | 0.61 | 0.00 |

| | | Proportion of Control samples | | |
|---|---|---|---|---|
| | | with Reactivity | | |
| Antigen | UniProt | AA | C | H |
| Filaggrin | P20930 | 0.00 | 0.00 | 0.00 |
| Fibrin | | | | |
| Fibrinogen alpha | P02671 | 0.00 | 0.00 | 0.00 |
| chain | | | | |
| Fibrinogen beta chain | P02675 | 0.00 | 0.00 | 0.00 |
| Fibrinogen gamma | P02679 | 0.00 | 0.00 | 0.00 |
| chain | | | | |
| BiP | P11021 | 0.00 | 0.00 | 0.00 |
| RA33 | P22626 | 0.25 | 0.13 | 0.00 |
| Vimentin | P08670 | 0.13 | 0.00 | 0.00 |
| alpha-enolase | P06733 | 0.00 | 0.00 | 0.00 |
| PAD4 | Q9UM07 | 0.00 | 0.00 | 0.00 |

AA: Autoantibody (Native);
C: Citrullinated;
H: homocitrullinated

TABLE 5

| UniProt | # |
|---|---|
| P09848 | 14 |
| Q15399 | 14 |
| O94919 | 14 |
| Q9Y5H2 | 14 |
| Q9Y2C9 | 14 |
| P51841 | 13 |
| Q9Y5Y9 | 13 |
| Q9BXJ2 | 13 |
| P40121 | 13 |
| O75077 | 13 |
| Q9Y6Z7 | 13 |
| Q8NHL6 | 13 |
| Q5VUB5 | 13 |
| P47901 | 12 |
| P0C0L4 | 12 |
| P23435 | 12 |
| P10767 | 12 |
| Q02846 | 12 |
| P14735 | 12 |
| P56199 | 12 |
| Q15046 | 12 |
| O60928 | 12 |
| P32004 | 12 |
| Q15113 | 12 |
| P43119 | 12 |
| Q99835 | 12 |
| Q9UP52 | 12 |
| Q13093 | 12 |
| Q7L0X0 | 12 |
| Q13421 | 12 |
| Q9NZU1 | 12 |
| O94991 | 12 |
| Q8N0Z9 | 12 |
| Q9UN66 | 12 |
| Q9BYF1 | 12 |
| Q9HCQ7 | 12 |
| Q6UWM9 | 12 |
| Q9H0X4 | 12 |
| Q9NT22 | 12 |
| Q8WUJ1 | 12 |
| Q8NGT5 | 12 |
| Q86SJ6 | 12 |
| Q86VR7 | 12 |
| Q8N158 | 12 |
| Q5UCC4 | 12 |
| P0C8F1 | 12 |
| Q8IWL1 | 12 |
| P0C0L5 | 12 |
| P01185 | 12 |
| P01732 | 12 |
| P13569 | 12 |
| Q14118 | 12 |
| P35462 | 12 |
| P29122 | 12 |
| Q9UBN4 | 12 |
| O00294 | 12 |
| O43820 | 12 |
| Q8N2S1 | 12 |
| O95460 | 12 |
| O95838 | 12 |
| Q92544 | 12 |
| O43561 | 12 |
| Q9NZP8 | 12 |
| Q96DB9 | 12 |
| Q6UY14 | 12 |
| Q86XS8 | 12 |
| Q9Y5G1 | 12 |
| Q6UXY8 | 12 |
| Q8N614 | 12 |
| Q9BXR5 | 12 |
| Q9C0A0 | 12 |
| Q9BWV1 | 12 |
| Q8IWL2 | 12 |
| O43306 | 11 |
| Q16671 | 11 |
| P02749 | 11 |
| Q9UL51 | 11 |
| P04003 | 11 |
| P32970 | 11 |
| P29323 | 11 |
| O75487 | 11 |
| Q9BTY2 | 11 |
| P22352 | 11 |
| O15303 | 11 |
| P12544 | 11 |
| P01574 | 11 |
| P29460 | 11 |
| P06858 | 11 |
| Q14767 | 11 |
| Q99467 | 11 |
| P55082 | 11 |
| P08138 | 11 |
| Q96S42 | 11 |
| O00634 | 11 |
| P55058 | 11 |
| Q92743 | 11 |
| P14672 | 11 |
| Q9NY91 | 11 |
| P47989 | 11 |
| O43506 | 11 |
| O43320 | 11 |
| Q8NHW4 | 11 |
| Q9NR23 | 11 |
| Q9BQT9 | 11 |
| O43291 | 11 |
| Q9Y581 | 11 |
| Q7L8A9 | 11 |
| Q9Y2G8 | 11 |
| Q96F46 | 11 |
| Q9UJQ1 | 11 |
| Q86VR8 | 11 |
| Q16769 | 11 |
| Q8IUX8 | 11 |
| Q9NYZ4 | 11 |
| O43692 | 11 |
| Q9NP84 | 11 |
| Q6AZY7 | 11 |
| Q9NR61 | 11 |
| Q9C0C4 | 11 |
| Q9NZD1 | 11 |
| Q9NPH9 | 11 |
| Q9Y5F8 | 11 |
| Q96SM3 | 11 |
| Q9NR82 | 11 |
| Q9HCU0 | 11 |
| Q9GZU1 | 11 |
| Q6UXK2 | 11 |
| Q9H237 | 11 |
| Q9BUR5 | 11 |
| Q5FYB0 | 11 |
| Q9H6B4 | 11 |
| Q96PJ5 | 11 |
| Q9H0B8 | 11 |
| Q96AP7 | 11 |
| Q8WXF3 | 11 |
| Q8NH00 | 11 |
| Q8NGU2 | 11 |
| Q96KN9 | 11 |
| Q8NET1 | 11 |
| Q30KQ7 | 11 |
| Q86XS5 | 11 |
| Q6P1S2 | 11 |
| Q6ZWJ8 | 11 |
| Q96R09 | 11 |
| Q69YU5 | 11 |
| Q04771 | 11 |
| P35348 | 11 |
| P18089 | 11 |
| P49913 | 11 |
| P21554 | 11 |
| P13942 | 11 |
| P29320 | 11 |
| P54764 | 11 |
| P54756 | 11 |
| O15197 | 11 |
| P00742 | 11 |
| Q12805 | 11 |
| P55259 | 11 |
| P08238 | 11 |
| Q12794 | 11 |
| P48357 | 11 |
| Q9ULZ9 | 11 |
| Q99102 | 11 |
| P13591 | 11 |
| P00973 | 11 |
| P78380 | 11 |
| P08183 | 11 |
| P29622 | 11 |
| P16109 | 11 |
| P05452 | 11 |
| P41587 | 11 |
| O75882 | 11 |
| O14788 | 11 |
| O14494 | 11 |
| Q9H013 | 11 |
| P50591 | 11 |
| Q9UNQ0 | 11 |
| Q14667 | 11 |
| Q9Y6N6 | 11 |
| O95399 | 11 |
| Q9UKP5 | 11 |
| Q9ULW2 | 11 |
| Q9BZP6 | 11 |
| Q9NNX6 | 11 |
| Q8N608 | 11 |
| Q8WWQ2 | 11 |
| Q9BZ11 | 11 |
| Q9H0U3 | 11 |
| Q6UWL6 | 11 |
| Q8NA29 | 11 |
| Q96JP9 | 11 |
| Q96P20 | 11 |
| Q96CH1 | 11 |
| Q6P531 | 11 |
| Q8TDQ1 | 11 |
| Q8NBM4 | 11 |
| Q6T423 | 11 |
| B8ZZ34 | 11 |
| P02771 | 10 |
| P43251 | 10 |
| O60840 | 10 |
| P06126 | 10 |
| P11912 | 10 |
| O15335 | 10 |
| P24855 | 10 |
| Q07507 | 10 |
| P25101 | 10 |
| P98172 | 10 |
| Q15768 | 10 |
| Q15375 | 10 |
| P54762 | 10 |
| P03951 | 10 |
| P12314 | 10 |
| P36888 | 10 |
| P40197 | 10 |
| O43424 | 10 |
| P05111 | 10 |
| P08514 | 10 |
| P26006 | 10 |
| P17658 | 10 |
| Q9UNX9 | 10 |
| P09382 | 10 |
| Q01718 | 10 |
| P09238 | 10 |
| P33527 | 10 |
| Q93086 | 10 |
| P47900 | 10 |
| Q16557 | 10 |
| P49190 | 10 |
| P35542 | 10 |
| P22732 | 10 |
| Q9UPR5 | 10 |
| P20062 | 10 |
| P16035 | 10 |
| O00295 | 10 |
| O00744 | 10 |
| P61073 | 10 |
| Q9NPG1 | 10 |
| Q13477 | 10 |
| Q9Y5G5 | 10 |
| Q92478 | 10 |
| Q9Y258 | 10 |
| P59901 | 10 |
| Q7Z4F1 | 10 |
| O60412 | 10 |
| Q9UBP4 | 10 |
| Q9Y336 | 10 |
| Q9NYY1 | 10 |
| Q4KMG0 | 10 |
| Q9H228 | 10 |
| Q8IWV1 | 10 |
| Q9NRA1 | 10 |
| Q9HD89 | 10 |
| Q96GW7 | 10 |
| Q9GZN4 | 10 |
| Q32P28 | 10 |
| Q96QV1 | 10 |
| Q9BSN7 | 10 |
| Q99944 | 10 |
| Q8WTR4 | 10 |
| Q96JB6 | 10 |
| Q9H5Y7 | 10 |
| Q96KN2 | 10 |
| Q3SXP7 | 10 |
| Q9BU40 | 10 |
| Q969P0 | 10 |
| Q96PL5 | 10 |
| Q96L15 | 10 |
| Q9BQY6 | 10 |
| Q8J025 | 10 |
| Q53RT3 | 10 |
| Q8TCU3 | 10 |
| Q7RTT9 | 10 |
| P59535 | 10 |
| Q641Q3 | 10 |
| A6NLU5 | 10 |
| Q6DN72 | 10 |
| A6NI73 | 10 |
| Q7Z410 | 10 |
| Q6AI14 | 10 |
| Q8NGD1 | 10 |
| Q5T1S8 | 10 |
| Q6MZM9 | 10 |
| Q5JRS4 | 10 |
| Q6UX82 | 10 |
| Q8N967 | 10 |
| P28039 | 10 |
| P23634 | 10 |
| P23560 | 10 |
| O00238 | 10 |
| P28908 | 10 |
| Q12884 | 10 |
| P41439 | 10 |
| P28472 | 10 |
| O14764 | 10 |
| P55107 | 10 |
| P36382 | 10 |
| Q99679 | 10 |
| P48058 | 10 |
| P17693 | 10 |
| P08887 | 10 |
| P48549 | 10 |
| P31025 | 10 |
| P29376 | 10 |
| P61626 | 10 |
| P55083 | 10 |
| P34130 | 10 |
| Q9UN70 | 10 |
| P60201 | 10 |
| P49862 | 10 |
| Q92932 | 10 |
| Q99731 | 10 |
| P23975 | 10 |
| P48067 | 10 |
| Q12846 | 10 |
| Q14515 | 10 |
| Q14162 | 10 |
| Q15403 | 10 |
| Q99985 | 10 |
| Q9UKF2 | 10 |
| O94956 | 10 |
| Q9Y5E4 | 10 |
| O15204 | 10 |
| Q9UHX3 | 10 |
| Q8WU66 | 10 |
| Q8IWT6 | 10 |
| Q9P0V8 | 10 |
| Q96N19 | 10 |
| Q9P2E7 | 10 |
| Q9HB40 | 10 |
| Q9H239 | 10 |
| Q8NC67 | 10 |
| Q8TAA9 | 10 |
| Q6UWQ5 | 10 |
| Q7Z4W2 | 10 |
| Q86Z14 | 10 |
| Q8NET8 | 10 |
| Q6QNK2 | 10 |
| Q8NGU9 | 10 |

TABLE 6
25 most frequent citrullinated proteins associated with RA

| UniProt | | Proportion of RA | Previous Association |
|---|---|---|---|
| ID | Gene | patients with reactivity | with RA |
| P09848 | LCT | 0.778 | No |
| Q15399 | TLR1 | 0.778 | No |
| O94919 | ENDOD1 | 0.778 | No |
| Q9Y5H2 | PCDHGA11 | 0.778 | No |
| Q9Y2C9 | TLR6 | 0.778 | No |
| P51841 | GUCY2F | 0.722 | No |
| Q9Y5Y9 | SCN10A | 0.722 | No |
| Q9BXJ2 | C1QTNF7 | 0.722 | No |
| P40121 | CAPG | 0.722 | Yes |
| O75077 | ADAM23 | 0.722 | No |
| Q9Y6Z7 | COLEC10 | 0.722 | No |
| Q8NHL6 | LILRB1 | 0.722 | Yes |
| Q5VUB5 | FAM171A1 | 0.722 | No |
| P47901 | AVPR1B | 0.667 | No |
| P0C0L4 | C4A | 0.667 | No |
| P23435 | CBLN1 | 0.667 | No |
| P10767 | FGF6 | 0.667 | No |
| Q02846 | GUCY2D | 0.667 | No |
| P14735 | IDE | 0.667 | No |
| P56199 | ITGA1 | 0.667 | No |
| Q15046 | KARS | 0.667 | No |
| O60928 | KCNJ13 | 0.667 | No |
| P32004 | L1CAM | 0.667 | No |
| Q15113 | PCOLCE | 0.667 | No |
| P43119 | PTGIR | 0.667 | Yes |

[0110] Within the RA Abinome, hierarchical clustering analysis showed 12 out of 18 RA samples had consistent peptide level reactivity against citrullinated peptide probes and readily formed a distinctive group of RA patients from controls (FIG. 4, center). In contrast, antibody reactivity against native peptide probes (autoantibody) did not show any ability to distinguish between RA and control samples (FIG. 4, left). Interestingly, strong reactivity against homocitrullinated peptide probes was seen in four RA samples, although those individuals also showed reactivity against citrullinated peptide probes and did not constitute a homocitrulline positive, citrulline negative subgroup (FIG. 4, right).

[0111] The nanoliter-scale immunoassay platform was used to validate the peptide array findings in RA sera. Due to the overlapping nature of the linear peptide array, antibody reactivity against a linear epitope is expected to be represented by signal from multiple contiguous peptide probes. As these epitopes may have potential implications for RA prognosis/diagnosis and are the bases of current diagnostic assays, frequently occurring citrullinated epitopes observed in RA samples are summarized in Table 7. Consistent with Table 6, the majority of the proteins with frequently occurring epitopes has not been previously associated with RA. While summarizing RA specific epitopes represents a more restrictive view, RA specific antibody reactivity at over 50% frequency was nonetheless observed in this cohort. These frequently occurring epitopes against citrullinated peptide probes range from 20 amino acids (2 contiguous peptides) in size to as long as 44 amino acids (7 contiguous peptides), with a mean of 26.7 amino acids. Frequently occurring epitopes at 50% frequency were not seen against homocitrullinated and native peptides exclusively in RA serum samples, nor were these observed in control samples.

TABLE 7
25 most frequent citrullinated epitopes associated with
RA. Start and end positions refer to the first and last
positions of the peptides found within the epitope.

| UniProt | | | | Mean Proportion of RA |
|---|---|---|---|---|
| ID | Gene | Start | End | Patients with Reactivity |
| P0C8F1 | PATE4 | 29 | 68 | 0.57 |
| Q69YU5 | C12orf73 | 33 | 56 | 0.56 |
| Q8WXF3 | RLN3 | 89 | 128 | 0.57 |
| Q8NET1 | DEFB108B | 13 | 32 | 0.56 |
| Q9UMX5 | NENF | 69 | 112 | 0.58 |
| Q30KQ7 | DEFB113 | 33 | 52 | 0.56 |
| Q8NHW4 | CCL4L2 | 61 | 80 | 0.56 |
| Q99731 | CCL19 | 57 | 76 | 0.56 |
| P0DJI8 | SAA1 | 49 | 72 | 0.61 |
| P0DJI9 | SAA2 | 49 | 72 | 0.61 |
| Q96NZ9 | PRAP1 | 69 | 96 | 0.56 |
| Q9NP84 | TNFRSF12A | 29 | 52 | 0.56 |
| P49913 | FALL39 | 105 | 132 | 0.57 |
| Q9NPH9 | IL26 | 21 | 48 | 0.56 |
| P78380 | OLR1 | 217 | 260 | 0.57 |
| P35542 | SAA4 | 49 | 68 | 0.56 |
| Q9BQY6 | WFDC6 | 57 | 76 | 0.56 |
| P01185 | AVP | 13 | 36 | 0.64 |
| Q9P0M4 | IL17C | 41 | 68 | 0.58 |
| Q9NYY1 | IL20 | 41 | 64 | 0.56 |
| Q99470 | SDF2 | 65 | 92 | 0.64 |
| P01574 | IFNB1 | 121 | 144 | 0.56 |
| P32970 | CD70 | 153 | 176 | 0.56 |
| Q9HCQ7 | NPVF | 37 | 60 | 0.63 |
| A8K4G0 | UNQ2530/PRO6029 | 53 | 76 | 0.56 |

[0112] To verify antibody reactivity findings for frequently occurring epitopes, the nanoliter-scale immunoassay system was used. The nanoliter-scale immunoassay system employs microfluidics to carry out an automated miniature ELISA assay. An illustrative example is shown in FIGS. 5A and 5B, where peptide sequence CNTCIYTEGWKCMAG-R/cit-GTCIAKENELCS (SEQ ID NO: 1) (shaded area centered about position 30) corresponding to positions 29-56 of the protein PATE4 (POCRF1) and including four contiguous peptide probes on array, were synthesized commercially as a single epitope with C-terminal biotinylation via a terminal lysine residue. In all eight samples shown in FIGS. 5A and 5B (four controls and four RA samples), little to no detectable antibody reactivity was observed for the native peptides on array. This is consistent with integrated signal obtained from the nanoliter-scale immunoassay system. In contrast, three out of four RA samples showed strong reactivity on array for the citrullinated peptides within this epitope, as well as the nanoliter-scale immunoassay system (FIG. 5B, far right column). While the overall concordance between the signal generated from the nanoliter-scale immunoassay system and the disclosed peptide array is high, due to differences in surface properties between the peptide array surface and the nanoliter-scale immunoassay system streptavidin coated beads, signal between the two technologies cannot be quantitatively reproduced perfectly (i.e., by regression coefficients and R² values). However, a qualitative assessment comparing the array signal and the nanoliter-scale immunoassay system output for the 20+ epitopes in the validation experiment showed concordance 86.4% of the time.

[0113] Given the large number of frequently occurring citrullinated epitopes as shown in Table 7, the possibility of constructing a novel RA diagnostic classifier based on epitope data derived from the peptide array using the nanoliter-scale immunoassay system was explored. As shown in FIGS. 6A and 6B, overall diagnostic performance of an 8-epitope classifier (sequences shown in Table 1) was first assessed on a cohort of 92 samples (29 controls and 63 RA samples), yielding 96% specificity and 92% sensitivity. As a comparison, the present RA samples were tested using a commercially available CCP2 assay, yielding 96.6% specificity and 68.3% sensitivity. Selection of the 8-eptiope classifier was achieved by selecting epitopes that collectively resulted in a positive identification of each of those subject samples characterized as being positive RA while ensuring that control (i.e., RA negative) samples were not identified. Considering, for example, RA positive samples 50-60 only, epitope V1 provided a positive identification for RA samples 50-53 and 55-60, while successfully distinguishing control samples (i.e., control samples were not identified as RA positive). Accordingly, to identify RA positive sample 54, several epitopes could be selected for use in combination with epitope, including at least epitopes V3, V5, V17, and V27. Notably, each of epitopes V3, V5, V17, and V27 additionally provided for redundant (unique) or non-redundant (non-unique) identification of other RA positive samples as see in FIG. 6A.

[0114] It will be appreciated that a variety of approaches may be taken to select a combination of epitopes for use as a peptide classifier. If qualitative or quantitative information is known about the ability of an epitope to identify one or more RA positive samples from a set of samples while also successfully distinguishing control samples, then a combination of epitopes can be selected by hand or with automated methods that collectively and correctly identify at least a majority of a set of samples. Automated methods include machine learning algorithms as described herein, and other automated methods for assembling a combination of epitopes as will be appreciated by one of ordinary skill in the art. In certain situations, it may be valuable to gauge the efficacy of a set of epitopes for use as a peptide classifier by measuring or calculating the sensitivity and specificity of the set of epitopes. At present, leading CCP2 assays are capable of delivering a specificity of about 0.95 and a sensitivity of about 0.70. Therefore, it may be useful to select a peptide classifier with a specificity of at least 0.95 and a sensitivity of at least 0.70.

[0115] To further validate the diagnostic performance of the disclosed 8-epitope classifier (Table 1), an independent cohort of 181 serum samples (54 controls and 127 RA samples) was obtained from a commercial source and tested on the nanoliter-scale immunoassay system (FIG. 6B). The overall diagnostic performance in the validation cohort was 95% specificity and 85% sensitivity.

The application's sequence listing, which the Patent Office published only in electronic form, follows.

SEQUENCE LISTING (9015 sequences)

SEQ ID NO: 1 - protein, 28 aa, Artificial Sequence
  source: /note="Description of Artificial Sequence: Synthetic peptide"
  VARIANT (16)..(16): /replace="Citrulline"
  SITE (1)..(28): /note="Variant residues given in the sequence have no preference with respect to those in the annotations for variant positions"
CNTCIYTEGWKCMAGRGTCIAKENELCS

SEQ ID NO: 2 - protein, 28 aa, Artificial Sequence
  source: /note="Description of Artificial Sequence: Synthetic peptide"
  VARIANT (16)..(16): /replace="Citrulline"
  SITE (1)..(28): /note="Variant residues given in the sequence have no preference with respect to those in the annotations for variant positions"
KGVVFDVTSGKEFYGRGAPYNALTGKDS

SEQ ID NO: 3 - protein, 28 aa, Artificial Sequence
  source: /note="Description of Artificial Sequence: Synthetic peptide"
  VARIANT (13)..(14): /replace="Citrulline"
  SITE (1)..(28): /note="Variant residues given in the sequence have no preference with respect to those in the annotations for variant positions"
YKAKYPIVGYTARRILNEDGSPNLDFKP

SEQ ID NO: 4 - protein, 19 aa, Artificial Sequence
  source: /note="Description of Artificial Sequence: Synthetic peptide"
  VARIANT (7)..(7): /replace="Citrulline"
  VARIANT (10)..(10): /replace="Citrulline"
  SITE (1)..(19): /note="Variant residues given in the sequence have no preference with respect to those in the annotations for variant positions"
MEWFSYRGGRLDQLACTLP

SEQ ID NO: 5 - protein, 27 aa, Artificial Sequence
  source: /note="Description of Artificial Sequence: Synthetic peptide"
  VARIANT (1)..(1): /replace="Homocitrulline"
  VARIANT (4)..(4): /replace="Homocitrulline"
  VARIANT (16)..(16): /replace="Homocitrulline"
  SITE (1)..(27): /note="Variant residues given in the sequence have no preference with respect to those in the annotations for variant positions"
KNEKVGSHGTQDQCNKTSNGSDSCDLM

SEQ ID NO: 6 - protein, 28 aa, Artificial Sequence
  source: /note="Description of Artificial Sequence: Synthetic peptide"
  VARIANT (13)..(13): /replace="Citrulline"
  SITE (1)..(28): /note="Variant residues given in the sequence have no preference with respect to those in the annotations for variant positions"
IYGLQPNLVPEFRGVMKVDINLQKVDID

SEQ ID NO: 7 - protein, 20 aa, Artificial Sequence
  source: /note="Description of Artificial Sequence: Synthetic peptide"
  VARIANT (16)..(16): /replace="Homocitrulline"
  SITE (1)..(20): /note="Variant residues given in the sequence have no preference with respect to those in the annotations for variant positions"
VLEVPEFNGLSQAIDKNLLR

SEQ ID NO: 8 - protein, 20 aa, Artificial Sequence
  source: /note="Description of Artificial Sequence: Synthetic peptide"
  VARIANT (5)..(5): /replace="Citrulline"
  VARIANT (13)..(13): /replace="Citrulline"
  SITE (1)..(20): /note="Variant residues given in the sequence have no preference with respect to those in the annotations for variant positions"
DCPNRTCELGNGRELCGCIE

SEQ ID NO: 9 - protein, 16 aa, Artificial Sequence
  source: /note="Description of Artificial Sequence: Synthetic peptide"
SLKRLTDKEADEYYMR

SEQ ID NO: 10 - protein, 16 aa, Artificial Sequence
  source: /note="Description of Artificial Sequence: Synthetic peptide"
LTDKEADEYYMRRRHL

SEQ ID NO: 11 - protein, 16 aa, Artificial Sequence
  source: /note="Description of Artificial Sequence: Synthetic peptide"
SQSSPEFKGSLASLSD

SEQ ID NO: 12 - protein, 16 aa, Artificial Sequence
  source: /note="Description of Artificial Sequence: Synthetic peptide"
PEFKGSLASLSDSLGV

SEQ ID NO: 13 - protein, 16 aa, Artificial Sequence
  source: /note="Description of Artificial Sequence: Synthetic peptide"
  MOD_RES (8)..(8): HomoCitrulline
SQSSPEFXGSLASLSD

SEQ ID NO: 14 - protein, 16 aa, Artificial Sequence
  source: /note="Description of Artificial Sequence: Synthetic peptide"
  MOD_RES (4)..(4): HomoCitrulline
PEFXGSLASLSDSLGV

SEQ ID NO: 15 - protein, 16 aa, Artificial Sequence
  source: /note="Description of Artificial Sequence: Synthetic peptide"
  MOD_RES (5)..(5): Citrulline
  MOD_RES (10)..(10): Citrulline
AAGNXAPGPXGSYLGG

SEQ ID NO: 16 - protein, 16 aa, Artificial Sequence
  source: /note="Description of Artificial Sequence: Synthetic peptide"
  MOD_RES (1)..(1): Citrulline
  MOD_RES (6)..(6): Citrulline
XAPGPXGSYLGGYSAG

SEQ ID NO: 17 - protein, 16 aa, Artificial Sequence
  source: /note="Description of Artificial Sequence: Synthetic peptide"
  MOD_RES (2)..(2): Citrulline
  MOD_RES (13)..(13): Citrulline
PXGSYLGGYSAGXGIY

SEQ ID NO: 18 - protein, 16 aa, Artificial Sequence
  source: /note="Description of Artificial Sequence: Synthetic peptide"
  MOD_RES (7)..(7): Citrulline
  MOD_RES (10)..(10): Citrulline
VYENQGXDTXGAWGPA

SEQ ID NO: 19 - protein, 16 aa, Artificial Sequence
  source: /note="Description of Artificial Sequence: Synthetic peptide"
  MOD_RES (3)..(3): Citrulline
  MOD_RES (6)..(6): Citrulline
QGXDTXGAWGPAAIPN

SEQ ID NO: 20 - protein, 16 aa, Artificial Sequence
  source: /note="Description of Artificial Sequence: Synthetic peptide"
  MOD_RES (2)..(2): Citrulline
TXGAWGPAAIPNTDVN

SEQ ID NO: 21 - protein, 16 aa, Artificial Sequence
  source: /note="Description of Artificial Sequence: Synthetic peptide"
  MOD_RES (10)..(10): Citrulline
NCAKNLFSTXGKPNFT

SEQ ID NO: 22 - protein, 15 aa, Artificial Sequence
  source: /note="Description of Artificial Sequence: Synthetic peptide"
  MOD_RES (6)..(6): Citrulline
  MOD_RES (13)..(13): Citrulline
NLFSTXGKPNFTXHP

SEQ ID NO: 23 - protein, 16 aa, Artificial Sequence
  source: /note="Description of Artificial Sequence: Synthetic peptide"
  MOD_RES (10)..(10): Citrulline
IAFKTSDFSXGSPNAK

SEQ ID NO: 24 - protein, 16 aa, Artificial Sequence
  source: /note="Description of Artificial Sequence: Synthetic peptide"
  MOD_RES (6)..(6): Citrulline
TSDFSXGSPNAKPKVF

SEQ ID NO: 25 - protein, 16 aa, Artificial Sequence
  source: /note="Description of Artificial Sequence: Synthetic peptide"
  MOD_RES (2)..(2): Citrulline
SXGSPNAKPKVFTCEV

SEQ ID NO: 26 - protein, 16 aa, Artificial Sequence
  source: /note="Description of Artificial Sequence: Synthetic peptide"
  MOD_RES (8)..(8): Citrulline
LCVNKEEXGMKIYYMQ

SEQ ID NO: 27 - protein, 16 aa, Artificial Sequence
  source: /note="Description of Artificial Sequence: Synthetic peptide"
  MOD_RES (4)..(4): Citrulline
KEEXGMKIYYMQVQMN

SEQ ID NO: 28 - protein, 16 aa, Artificial Sequence
  source: /note="Description of Artificial Sequence: Synthetic peptide"
  MOD_RES (10)..(10): Citrulline
GYLCYSGYSXGGSSYP

SEQ ID NO: 29 - protein, 16 aa, Artificial Sequence
  source: /note="Description of Artificial Sequence: Synthetic peptide"
  MOD_RES (6)..(6): Citrulline
YSGYSXGGSSYPSNLV

SEQ ID NO: 30 - protein, 16 aa, Artificial Sequence
  source: /note="Description of Artificial Sequence: Synthetic peptide"
  MOD_RES (3)..(3): Citrulline
  MOD_RES (9)..(9): Citrulline
ALXDPSVPXGLLKTGF

SEQ ID NO: 31 - protein, 16 aa, Artificial Sequence
  source: /note="Description of Artificial Sequence: Synthetic peptide"
  MOD_RES (5)..(5): Citrulline
PSVPXGLLKTGFPWPP

SEQ ID NO: 32 - protein, 16 aa, Artificial Sequence
  source: /note="Description of Artificial Sequence: Synthetic peptide"
  MOD_RES (9)..(9): Citrulline
AASTLLQNXGALQAVD

SEQ ID NO: 33 - protein, 16 aa, Artificial Sequence
  source: /note="Description of Artificial Sequence: Synthetic peptide"
  MOD_RES (5)..(5): Citrulline
LLQNXGALQAVDQLSL

SEQ ID NO: 34 - protein, 16 aa, Artificial Sequence
  source: /note="Description of Artificial Sequence: Synthetic peptide"
  MOD_RES (13)..(13): Citrulline
TDYHKAAMGLGAXGLL

SEQ ID NO: 35 - protein, 16 aa, Artificial Sequence
  source: /note="Description of Artificial Sequence: Synthetic peptide"
  MOD_RES (9)..(9): Citrulline
  MOD_RES (15)..(15): Citrulline
KAAMGLGAXGLLLSXE

SEQ ID NO: 36 - protein, 16 aa, Artificial Sequence
  source: /note="Description of Artificial Sequence: Synthetic peptide"
  MOD_RES (5)..(5): Citrulline
  MOD_RES (11)..(11): Citrulline
GLGAXGLLLSXENEDQ

SEQ ID NO: 37 - protein, 16 aa, Artificial Sequence
  source: /note="Description of Artificial Sequence: Synthetic peptide"
  MOD_RES (5)..(5): Citrulline
  MOD_RES (7)..(7): Citrulline
LSTKXGXGGGEAAQSP

SEQ ID NO: 38 - protein, 16 aa, Artificial Sequence
  source: /note="Description of Artificial Sequence: Synthetic peptide"
  MOD_RES (1)..(1): Citrulline
  MOD_RES (3)..(3): Citrulline
XGXGGGEAAQSPGPLP

SEQ ID NO: 39 - protein, 16 aa, Artificial Sequence
  source: /note="Description of Artificial Sequence: Synthetic peptide"
  MOD_RES (10)..(10): Citrulline
  MOD_RES (15)..(15): Citrulline
ASAVVKQPVXGASGXT

SEQ ID NO: 40 - protein, 16 aa, Artificial Sequence
  source: /note="Description of Artificial Sequence: Synthetic peptide"
  MOD_RES (6)..(6): Citrulline
  MOD_RES (11)..(11): Citrulline
VKQPVXGASGXTTITA

SEQ ID NO: 41 - protein, 16 aa, Artificial Sequence
  source: /note="Description of Artificial Sequence: Synthetic peptide"
  MOD_RES (10)..(10): Citrulline
VIHTVGPIAXGHINGS

SEQ ID NO: 42 - protein, 16 aa, Artificial Sequence
  source: /note="Description of Artificial Sequence: Synthetic peptide"
  MOD_RES (6)..(6): Citrulline
VGPIAXGHINGSHKED

SEQ ID NO: 43 - protein, 16 aa, Artificial Sequence
  source: /note="Description of Artificial Sequence: Synthetic peptide"
  MOD_RES (2)..(2): Citrulline
AXGHINGSHKEDLANC

SEQ ID NO: 44 - protein, 16 aa, Artificial Sequence
  source: /note="Description of Artificial Sequence: Synthetic peptide"
  MOD_RES (8)..(8): Citrulline
  MOD_RES (10)..(10): Citrulline
GHSPDDHXVXGSGKGG

SEQ ID NO: 45 - protein, 16 aa, Artificial Sequence
  source: /note="Description of Artificial Sequence: Synthetic peptide"
  MOD_RES (4)..(4): Citrulline
  MOD_RES (6)..(6): Citrulline
DDHXVXGSGKGGKPPQ

SEQ ID NO: 46 - protein, 16 aa, Artificial Sequence
  source: /note="Description of Artificial Sequence: Synthetic peptide"
  MOD_RES (13)..(13): Citrulline
ISGFGNTLSSSTXGSK

SEQ ID NO: 47 - protein, 16 aa, Artificial Sequence
  source: /note="Description of Artificial Sequence: Synthetic peptide"
  MOD_RES (9)..(9): Citrulline
GNTLSSSTXGSKLPLQ

SEQ ID NO: 48 - protein, 16 aa, Artificial Sequence
  source: /note="Description of Artificial Sequence: Synthetic peptide"
  MOD_RES (5)..(5): Citrulline
SSSTXGSKLPLQESKS

SEQ ID NO: 49 - protein, 16 aa, Artificial Sequence
  source: /note="Description of Artificial Sequence: Synthetic peptide"
  MOD_RES (9)..(9): Citrulline
  MOD_RES (12)..(12): Citrulline
DSHLAKHTXIHXGDKH

SEQ ID NO: 50 - protein, 16 aa, Artificial Sequence
  source: /note="Description of Artificial Sequence: Synthetic peptide"
  MOD_RES (5)..(5): Citrulline
  MOD_RES (8)..(8): Citrulline
AKHTXIHXGDKHYTCN

SEQ ID NO: 51 - protein, 16 aa, Artificial Sequence
  source: /note="Description of Artificial Sequence: Synthetic peptide"
  MOD_RES (1)..(1): Citrulline
  MOD_RES (4)..(4): Citrulline
XIHXGDKHYTCNECGK

SEQ ID NO: 52 - protein, 16 aa, Artificial Sequence
  source: /note="Description of Artificial Sequence: Synthetic peptide"
  MOD_RES (1)..(1): Citrulline
  MOD_RES (11)..(11): Citrulline
XEKVLQGLVPXGTVMG

SEQ ID NO: 53 - protein, 16 aa, Artificial Sequence
  source: /note="Description of Artificial Sequence: Synthetic peptide"
  MOD_RES (7)..(7): Citrulline
LQGLVPXGTVMGSLLG

SEQ ID NO: 54 - protein, 16 aa, Artificial Sequence
  source: /note="Description of Artificial Sequence: Synthetic peptide"
  MOD_RES (4)..(4): Citrulline
  MOD_RES (9)..(9): Citrulline
GTLXMWSAXGAELALL

SEQ ID NO: 55 - protein, 16 aa, Artificial Sequence
  source: /note="Description of Artificial Sequence: Synthetic peptide"
  MOD_RES (5)..(5): Citrulline
MWSAXGAELALLLGKD

SEQ ID NO: 56 - protein, 16 aa, Artificial Sequence
  source: /note="Description of Artificial Sequence: Synthetic peptide"
  MOD_RES (13)..(13): Citrulline
  MOD_RES (15)..(15): Citrulline
TCSAPCDGGIQTXGXS

SEQ ID NO: 57 - protein, 16 aa, Artificial Sequence
  source: /note="Description of Artificial Sequence: Synthetic peptide"
  MOD_RES (9)..(9): Citrulline
  MOD_RES (11)..(11): Citrulline
PCDGGIQTXGXSCSSL

SEQ ID NO: 58 - protein, 16 aa, Artificial Sequence
  source: /note="Description of Artificial Sequence: Synthetic peptide"
  MOD_RES (9)..(10): Citrulline
TGEKAIYKXXGELEPQ

SEQ ID NO: 59 - protein, 16 aa, Artificial Sequence
  source: /note="Description of Artificial Sequence: Synthetic peptide"
  MOD_RES (5)..(6): Citrulline
AIYKXXGELEPQLGSP

SEQ ID NO: 60 - protein, 16 aa, Artificial Sequence
  source: /note="Description of Artificial Sequence: Synthetic peptide"
  MOD_RES (1)..(2): Citrulline
XXGELEPQLGSPQQKP

SEQ ID NO: 61 - protein, 16 aa, Artificial Sequence
  source: /note="Description of Artificial Sequence: Synthetic peptide"
  MOD_RES (6)..(6): Citrulline
  MOD_RES (12)..(12): Citrulline
TVTNFXSPYHVXGPIN

SEQ ID NO: 62 - protein, 16 aa, Artificial Sequence
  source: /note="Description of Artificial Sequence: Synthetic peptide"
  MOD_RES (8)..(8): Citrulline
  MOD_RES (12)..(12): Citrulline
GNFIDKLXLFTXGGSG

SEQ ID NO: 63 - protein, 16 aa, Artificial Sequence
  source: /note="Description of Artificial Sequence: Synthetic peptide"
  MOD_RES (4)..(4): Citrulline
  MOD_RES (8)..(8): Citrulline
DKLXLFTXGGSGGMGY

SEQ ID NO: 64 - protein, 16 aa, Artificial Sequence
  source: /note="Description of Artificial Sequence: Synthetic peptide"
  MOD_RES (3)..(3): Citrulline
  MOD_RES (11)..(11): Citrulline
SPXGDGICVSXGKAPS

SEQ ID NO: 65 - protein, 16 aa, Artificial Sequence
  source: /note="Description of Artificial Sequence: Synthetic peptide"
  MOD_RES (5)..(5): Citrulline
  MOD_RES (13)..(13): Citrulline
ACGSXGGNFPSPXGGS

SEQ ID NO: 66 - protein, 16 aa, Artificial Sequence
  source: /note="Description of Artificial Sequence: Synthetic peptide"
  MOD_RES (1)..(1): Citrulline
  MOD_RES (9)..(9): Citrulline
XGGNFPSPXGGSGVAS

SEQ ID NO: 67 - protein, 16 aa, Artificial Sequence
  source: /note="Description of Artificial Sequence: Synthetic peptide"
  MOD_RES (10)..(10): Citrulline
  MOD_RES (16)..(16): Citrulline
PPGTMFGASXGYFPPX

SEQ ID NO: 68 - protein, 16 aa, Artificial Sequence
  source: /note="Description of Artificial Sequence: Synthetic peptide"
  MOD_RES (6)..(6): Citrulline
MWWGGXGQSFNIAPQK

SEQ ID NO: 69 - protein, 16 aa, Artificial Sequence
  source: /note="Description of Artificial Sequence: Synthetic peptide"
  MOD_RES (2)..(2): Citrulline
GXGQSFNIAPQKEEPE

SEQ ID NO: 70 - protein, 16 aa, Artificial Sequence
  source: /note="Description of Artificial Sequence: Synthetic peptide"
  MOD_RES (4)..(4): Citrulline
  MOD_RES (10)..(10): Citrulline
TFLXNTPWEXGKQSGQ

SEQ ID NO: 71 - protein, 16 aa, Artificial Sequence
  source: /note="Description of Artificial Sequence: Synthetic peptide"
  MOD_RES (6)..(6): Citrulline
NTPWEXGKQSGQLNSY

SEQ ID NO: 72 - protein, 16 aa, Artificial Sequence
  source: /note="Description of Artificial Sequence: Synthetic peptide"
  MOD_RES (2)..(2): Citrulline
EXGKQSGQLNSYTQVY

SEQ ID NO: 73 - protein, 16 aa, Artificial Sequence
  source: /note="Description of Artificial Sequence: Synthetic peptide"
  MOD_RES (4)..(4): Citrulline
  MOD_RES (9)..(9): Citrulline
LWSXQHVSXGTQQPES

SEQ ID NO: 74 - protein, 16 aa, Artificial Sequence
  source: /note="Description of Artificial Sequence: Synthetic peptide"
  MOD_RES (5)..(5): Citrulline
QHVSXGTQQPESPKVA

SEQ ID NO: 75 - protein, 16 aa, Artificial Sequence
  source: /note="Description of Artificial Sequence: Synthetic peptide"
  MOD_RES (6)..(6): Citrulline
  MOD_RES (10)..(10): Citrulline
TASTLXGKPXPPPVSA

SEQ ID NO: 76 - protein, 16 aa, Artificial Sequence
  source: /note="Description of Artificial Sequence: Synthetic peptide"
  MOD_RES (10)..(10): Citrulline
HKIEVEGVTXGAVELN

SEQ ID NO: 77 - protein, 16 aa, Artificial Sequence
  source: /note="Description of Artificial Sequence: Synthetic peptide"
  MOD_RES (6)..(6): Citrulline
VEGVTXGAVELNKSLF

SEQ ID NO: 78 - protein, 16 aa, Artificial Sequence
  source: /note="Description of Artificial Sequence: Synthetic peptide"
  MOD_RES (2)..(2): Citrulline
TXGAVELNKSLFETTP

SEQ ID NO: 79 - protein, 16 aa, Artificial Sequence
  source: /note="Description of Artificial Sequence: Synthetic peptide"
  MOD_RES (5)..(5): Citrulline
  MOD_RES (8)..(8): Citrulline
HGDVXGTXWLFETKPL

SEQ ID NO: 80 - protein, 16 aa, Artificial Sequence
  source: /note="Description of Artificial Sequence: Synthetic peptide"
  MOD_RES (2)..(2): Citrulline
  MOD_RES (9)..(9): Citrulline
CXHCFPCCXGSGKSNV

SEQ ID NO: 81 - protein, 16 aa, Artificial Sequence
  source: /note="Description of Artificial Sequence: Synthetic peptide"
  MOD_RES (5)..(5): Citrulline
FPCCXGSGKSNVGASG

SEQ ID NO: 82 - protein, 16 aa, Artificial Sequence
  source: /note="Description of Artificial Sequence: Synthetic peptide"
  MOD_RES (8)..(8): Citrulline
  MOD_RES (12)..(12): Citrulline
DSAFMEPXYHVXGEDL

SEQ ID NO: 83 - protein, 16 aa, Artificial Sequence
  source: /note="Description of Artificial Sequence: Synthetic peptide"
  MOD_RES (4)..(4): Citrulline
  MOD_RES (8)..(8): Citrulline
MEPXYHVXGEDLDKLH

SEQ ID NO: 84 - protein, 16 aa, Artificial Sequence
  source: /note="Description of Artificial Sequence: Synthetic peptide"
  MOD_RES (13)..(13): Citrulline
LGPTYPAAQLGPXGAA

SEQ ID NO: 85 - protein, 16 aa, Artificial Sequence
  source: /note="Description of Artificial Sequence: Synthetic peptide"
  MOD_RES (9)..(9): Citrulline
YPAAQLGPXGAAGYSW

SEQ ID NO: 86 - protein, 16 aa, Artificial Sequence
  source: /note="Description of Artificial Sequence: Synthetic peptide"
  MOD_RES (5)..(5): Citrulline
  MOD_RES (16)..(16): Citrulline
QLGPXGAAGYSWSPQX

SEQ ID NO: 87 - protein, 16 aa, Artificial Sequence
  source: /note="Description of Artificial Sequence: Synthetic peptide"
  MOD_RES (11)..(11): Citrulline
  MOD_RES (14)..(14): Citrulline
MGASGPGYPLXGGXAP

SEQ ID NO: 88 - protein, 16 aa, Artificial Sequence
  source: /note="Description of Artificial Sequence: Synthetic peptide"
  MOD_RES (7)..(7): Citrulline
  MOD_RES (10)..(10): Citrulline
GPGYPLXGGXAPSPGY

SEQ ID NO: 89 - protein, 16 aa, Artificial Sequence
  source: /note="Description of Artificial Sequence: Synthetic peptide"
  MOD_RES (3)..(3): Citrulline
  MOD_RES (6)..(6): Citrulline
PLXGGXAPSPGYPQQS

SEQ ID NO: 90 - protein, 16 aa, Artificial Sequence
  source: /note="Description of Artificial Sequence: Synthetic peptide"
  MOD_RES (4)..(4): Citrulline
  MOD_RES (12)..(12): Citrulline
TPGXSKGGSFHXGAGK

SEQ ID NO: 91 - protein, 16 aa, Artificial Sequence
  source: /note="Description of Artificial Sequence: Synthetic peptide"
  MOD_RES (9)..(9): Citrulline
NSFHGTGGXGNKFAQM

SEQ ID NO: 92 - protein, 16 aa, Artificial Sequence
  source: /note="Description of Artificial Sequence: Synthetic peptide"
  MOD_RES (5)..(5): Citrulline
  MOD_RES (13)..(13): Citrulline
GTGGXGNKFAQMXYSL

SEQ ID NO: 93 - protein, 16 aa, Artificial Sequence
  source: /note="Description of Artificial Sequence: Synthetic peptide"
  MOD_RES (11)..(11): Citrulline
TDIALKKLPIXGGALQ

SEQ ID NO: 94 - protein, 16 aa, Artificial Sequence
  source: /note="Description of Artificial Sequence: Synthetic peptide"
  MOD_RES (7)..(7): Citrulline
  MOD_RES (13)..(13): Citrulline
LKKLPIXGGALQXVKA

SEQ ID NO: 95 - protein, 16 aa, Artificial Sequence
  source: /note="Description of Artificial Sequence: Synthetic peptide"
  MOD_RES (12)..(12): Citrulline
SPAPLLSSPYSXGSAA

SEQ ID NO: 96 - protein, 16 aa, Artificial Sequence
  source: /note="Description of Artificial Sequence: Synthetic peptide"
  MOD_RES (8)..(8): Citrulline
  MOD_RES (14)..(14): Citrulline
LLSSPYSXGSAASXAA

SEQ ID NO: 97 - protein, 16 aa, Artificial Sequence
  source: /note="Description of Artificial Sequence: Synthetic peptide"
  MOD_RES (11)..(11): Citrulline
TPNIYSDEVLXGTKLP

SEQ ID NO: 98 - protein, 16 aa, Artificial Sequence
  source: /note="Description of Artificial Sequence: Synthetic peptide"
  MOD_RES (7)..(7): Citrulline
YSDEVLXGTKLPTGVD

SEQ ID NO: 99 - protein, 16 aa, Artificial Sequence
  source: /note="Description of Artificial Sequence: Synthetic peptide"
  MOD_RES (3)..(3): Citrulline
VLXGTKLPTGVDHMAS

SEQ ID NO: 100 - protein, 16 aa, Artificial Sequence
  source: /note="Description of Artificial Sequence: Synthetic peptide"
  MOD_RES (6)..(6): Citrulline
  MOD_RES (12)..(12): Citrulline
VKPNVXPGVGAXGSTA

SEQ ID NO: 101 - protein, 16 aa, Artificial Sequence
  source: /note="Description of Artificial Sequence: Synthetic peptide"
  MOD_RES (2)..(2): Citrulline
  MOD_RES (8)..(8): Citrulline
VXPGVGAXGSTASNPQ

SEQ ID NO: 102 - protein, 16 aa, Artificial Sequence
  source: /note="Description of Artificial Sequence: Synthetic peptide"
  MOD_RES (5)..(5): Citrulline
  MOD_RES (10)..(10): Citrulline
KATGXDSFPXGKTPEV

SEQ ID NO: 103 - protein, 16 aa, Artificial Sequence
  source: /note="Description of Artificial Sequence: Synthetic peptide"
  MOD_RES (13)..(13): Citrulline
EDYAVASKFQAIXGMI

SEQ ID NO: 104 - protein, 16 aa, Artificial Sequence
  source: /note="Description of Artificial Sequence: Synthetic peptide"
  MOD_RES (9)..(9): Citrulline
VASKFQAIXGMISEYK

SEQ ID NO: 105 - protein, 16 aa, Artificial Sequence
  source: /note="Description of Artificial Sequence: Synthetic peptide"
  MOD_RES (12)..(12): Citrulline
SCLDLCQKGLAXGLSP

SEQ ID NO: 106 - protein, 16 aa, Artificial Sequence
  source: /note="Description of Artificial Sequence: Synthetic peptide"
  MOD_RES (8)..(8): Citrulline
  MOD_RES (14)..(14): Citrulline
LCQKGLAXGLSPAXCL

SEQ ID NO: 107 - protein, 16 aa, Artificial Sequence
  source: /note="Description of Artificial Sequence: Synthetic peptide"
  MOD_RES (11)..(11): Citrulline
PSQALASGFHXGKQED

SEQ ID NO: 108 - protein, 16 aa, Artificial Sequence
  source: /note="Description of Artificial Sequence: Synthetic peptide"
  MOD_RES (7)..(7): Citrulline
LASGFHXGKQEDVHEF

SEQ ID NO: 109 - protein, 16 aa, Artificial Sequence
  source: /note="Description of Artificial Sequence: Synthetic peptide"
  MOD_RES (10)..(10): Citrulline
  MOD_RES (14)..(14): Citrulline
LGWPDTIAYXGVTXAS

SEQ ID NO: 110 - protein, 16 aa, Artificial Sequence
  source: /note="Description of Artificial Sequence: Synthetic peptide"
  MOD_RES (6)..(6): Citrulline
  MOD_RES (10)..(10): Citrulline
DTIAYXGVTXASVYMQ

SEQ ID NO: 111 - protein, 16 aa, Artificial Sequence
  source: /note="Description of Artificial Sequence: Synthetic peptide"
  MOD_RES (8)..(8): Citrulline
LSAPHITXGTFVGPQG

SEQ ID NO: 112 - protein, 16 aa, Artificial Sequence
  source: /note="Description of Artificial Sequence: Synthetic peptide"
  MOD_RES (4)..(4): Citrulline
HITXGTFVGPQGGSPW

SEQ ID NO: 113 - protein, 16 aa, Artificial Sequence
  source: /note="Description of Artificial Sequence: Synthetic peptide"
  MOD_RES (13)..(13): Citrulline
GGYTPDLKMSYSXGLI

SEQ ID NO: 114 - protein, 16 aa, Artificial Sequence
  source: /note="Description of Artificial Sequence: Synthetic peptide"
  MOD_RES (9)..(9): Citrulline
  MOD_RES (16)..(16): Citrulline
PDLKMSYSXGLIPVKX

SEQ ID NO: 115 - protein, 16 aa, Artificial Sequence
  source: /note="Description of Artificial Sequence: Synthetic peptide"
  MOD_RES (5)..(5): Citrulline
  MOD_RES (12)..(12): Citrulline
MSYSXGLIPVKXGPSS

SEQ ID NO: 116 - protein, 16 aa, Artificial Sequence
  source: /note="Description of Artificial Sequence: Synthetic peptide"
  MOD_RES (2)..(2): Citrulline
  MOD_RES (8)..(8): Citrulline
LXGHPGSXGAPFPHSG

SEQ ID NO: 117 - protein, 16 aa, Artificial Sequence
  source: /note="Description of Artificial Sequence: Synthetic peptide"
  MOD_RES (4)..(4): Citrulline
  MOD_RES (16)..(16): Citrulline
PGSXGAPFPHSGLQGX

SEQ ID NO: 118 - protein, 16 aa, Artificial Sequence
  source: /note="Description of Artificial Sequence: Synthetic peptide"
  MOD_RES (6)..(6): Citrulline
  MOD_RES (8)..(8): Citrulline
PQGQNXAXGKFSPWFS

SEQ ID NO: 119 - protein, 16 aa, Artificial Sequence
  source: /note="Description of Artificial Sequence: Synthetic peptide"
  MOD_RES (9)..(9): Citrulline
GLLGMQSGXGSQQWSA

SEQ ID NO: 120 - protein, 16 aa, Artificial Sequence
  source: /note="Description of Artificial Sequence: Synthetic peptide"
  MOD_RES (5)..(5): Citrulline
  MOD_RES (16)..(16): Citrulline
MQSGXGSQQWSAGTLX

SEQ ID NO: 121 - protein, 16 aa, Artificial Sequence
  source: /note="Description of Artificial Sequence: Synthetic peptide"
  MOD_RES (12)..(12): Citrulline
  MOD_RES (15)..(15): Citrulline
SASWSYTAFVTXGGXL

SEQ ID NO: 122 - protein, 16 aa, Artificial Sequence
  source: /note="Description of Artificial Sequence: Synthetic peptide"
  MOD_RES (8)..(8): Citrulline
  MOD_RES (11)..(11): Citrulline
SYTAFVTXGGXLELSG

SEQ ID NO: 123 - protein, 16 aa, Artificial Sequence
  source: /note="Description of Artificial Sequence: Synthetic peptide"
  MOD_RES (4)..(4): Citrulline
  MOD_RES (7)..(7): Citrulline
FVTXGGXLELSGSASG

SEQ ID NO: 124 - protein, 16 aa, Artificial Sequence
  source: /note="Description of Artificial Sequence: Synthetic peptide"
  MOD_RES (11)..(11): Citrulline
GEIWQLLGAPXGKPIF

SEQ ID NO: 125 - protein, 16 aa, Artificial Sequence
  source: /note="Description of Artificial Sequence: Synthetic peptide"
  MOD_RES (7)..(7): Citrulline
QLLGAPXGKPIFPVYP

SEQ ID NO: 126 - protein, 16 aa, Artificial Sequence
  source: /note="Description of Artificial Sequence: Synthetic peptide"
  MOD_RES (3)..(3): Citrulline
APXGKPIFPVYPLVGS

SEQ ID NO: 127 - protein, 15 aa, Artificial Sequence
  source: /note="Description of Artificial Sequence: Synthetic peptide"
  MOD_RES (6)..(7): Citrulline
QLLPSXXGEQLTLPP

SEQ ID NO: 128 - protein, 16 aa, Artificial Sequence
  source: /note="Description of Artificial Sequence: Synthetic peptide"
  MOD_RES (2)..(3): Citrulline
SXXGEQLTLPPPPQLG

SEQ ID NO: 129 - protein, 16 aa, Artificial Sequence
  source: /note="Description of Artificial Sequence: Synthetic peptide"
  MOD_RES (12)..(12): Citrulline
  MOD_RES (15)..(15): Citrulline
SVQDSWADHFQXGQXS

SEQ ID NO: 130 - protein, 16 aa, Artificial Sequence
  source: /note="Description of Artificial Sequence: Synthetic peptide"
  MOD_RES (8)..(8): Citrulline
  MOD_RES (11)..(11): Citrulline
SWADHFQXGQXSQVPA

SEQ ID NO: 131 - protein, 16 aa, Artificial Sequence
  source: /note="Description of Artificial Sequence: Synthetic peptide"
  MOD_RES (6)..(6): Citrulline
  MOD_RES (13)..(13): Citrulline
SGVGEXGWGASTXGTL

SEQ ID NO: 132 - protein, 12 aa, Artificial Sequence
  source: /note="Description of Artificial Sequence: Synthetic peptide"
  MOD_RES (2)..(2): Citrulline
  MOD_RES (9)..(9): Citrulline
EXGWGASTXGTL

SEQ ID NO: 133 - protein, 16 aa, Artificial Sequence
  source: /note="Description of Artificial Sequence: Synthetic peptide"
  MOD_RES (7)..(7): Citrulline
  MOD_RES (10)..(10): Citrulline
ALGTQEXLSXGGDAKS

SEQ ID NO: 134 - protein, 16 aa, Artificial Sequence
  source: /note="Description of Artificial Sequence: Synthetic peptide"
  MOD_RES (3)..(3): Citrulline
  MOD_RES (6)..(6): Citrulline
QEXLSXGGDAKSPVLQ

SEQ ID NO: 135 - protein, 16 aa, Artificial Sequence
  source: /note="Description of Artificial Sequence: Synthetic peptide"
  MOD_RES (10)..(10): Citrulline
HLLTHMKTHXGATAAP

SEQ ID NO: 136 - protein, 16 aa, Artificial Sequence
  source: /note="Description of Artificial Sequence: Synthetic peptide"
  MOD_RES (6)..(6): Citrulline
HMKTHXGATAAPGSGS

SEQ ID NO: 137 - protein, 16 aa, Artificial Sequence
  source: /note="Description of Artificial Sequence: Synthetic peptide"
  MOD_RES (7)..(7): Citrulline
SAGPGEXGSALLEFAG

SEQ ID NO: 138 - protein, 16 aa, Artificial Sequence
  source: /note="Description of Artificial Sequence: Synthetic peptide"
  MOD_RES (3)..(3): Citrulline
GEXGSALLEFAGGTSF

SEQ ID NO: 139 - protein, 16 aa, Artificial Sequence
  source: /note="Description of Artificial Sequence: Synthetic peptide"
  MOD_RES (3)..(3): Citrulline
  MOD_RES (7)..(7): Citrulline
AVXWLAXGQTGKVGVN

SEQ ID NO: 140 - protein, 16 aa, Artificial Sequence
  source: /note="Description of Artificial Sequence: Synthetic peptide"
  MOD_RES (3)..(3): Citrulline
LAXGQTGKVGVNTNLK

SEQ ID NO: 141 - protein, 16 aa, Artificial Sequence
  source: /note="Description of Artificial Sequence: Synthetic peptide"
  MOD_RES (10)..(10): Citrulline
KEGGGSANTXGASTPP

SEQ ID NO: 142 - protein, 16 aa, Artificial Sequence
  source: /note="Description of Artificial Sequence: Synthetic peptide"
  MOD_RES (6)..(6): Citrulline
GSANTXGASTPPTLGD

SEQ ID NO: 143 - protein, 16 aa, Artificial Sequence
  source: /note="Description of Artificial Sequence: Synthetic peptide"
  MOD_RES (8)..(8): Citrulline
  MOD_RES (15)..(15): Citrulline
ASTHSGSXGDALNLXG

SEQ ID NO: 144 - protein, 16 aa, Artificial Sequence
  source: /note="Description of Artificial Sequence: Synthetic peptide"
  MOD_RES (7)..(7): Citrulline
  MOD_RES (11)..(11): Citrulline
GDALNLXGLKXSKPDA

SEQ ID NO: 145 - protein, 16 aa, Artificial Sequence
  source: /note="Description of Artificial Sequence: Synthetic peptide"
  MOD_RES (11)..(11): Citrulline
  MOD_RES (14)..(14): Citrulline
GSVSTIHFNQXGTXLA

SEQ ID NO: 146 - protein, 16 aa, Artificial Sequence
  source: /note="Description of Artificial Sequence: Synthetic peptide"
  MOD_RES (7)..(7): Citrulline
  MOD_RES (10)..(10): Citrulline
TIHFNQXGTXLASSGD

SEQ ID NO: 147 - protein, 16 aa, Artificial Sequence
  source: /note="Description of Artificial Sequence: Synthetic peptide"
  MOD_RES (1)..(1): Citrulline
  MOD_RES (10)..(10): Citrulline
XPGCQGGSEXGSIPLL

SEQ ID NO: 148 - protein, 16 aa, Artificial Sequence
  source: /note="Description of Artificial Sequence: Synthetic peptide"
  MOD_RES (6)..(6): Citrulline
QGGSEXGSIPLLVKNS

SEQ ID NO: 149 - protein, 16 aa, Artificial Sequence
  source: /note="Description of Artificial Sequence: Synthetic peptide"
  MOD_RES (2)..(2): Citrulline
EXGSIPLLVKNSTCYD

SEQ ID NO: 150 - protein, 16 aa, Artificial Sequence
  source: /note="Description of Artificial Sequence: Synthetic peptide"
  MOD_RES (11)..(11): Citrulline
  MOD_RES (16)..(16): Citrulline
EAAKATDWNVXGCPTX

SEQ ID NO: 151 - protein, 16 aa, Artificial Sequence
  source: /note="Description of Artificial Sequence: Synthetic peptide"
  MOD_RES (7)..(7): Citrulline
  MOD_RES (12)..(12): Citrulline
ATDWNVXGCPTXTSVK

SEQ ID NO: 152 - protein, 16 aa, Artificial Sequence
  source: /note="Description of Artificial Sequence: Synthetic peptide"
  MOD_RES (7)..(7): Citrulline
  MOD_RES (10)..(10): Citrulline
WLAGQCXISXGGNDTC

SEQ ID NO: 153 - protein, 16 aa, Artificial Sequence
  source: /note="Description of Artificial Sequence: Synthetic peptide"
  MOD_RES (3)..(3): Citrulline
  MOD_RES (6)..(6): Citrulline
QCXISXGGNDTCFLEG

SEQ ID NO: 154 - protein, 16 aa, Artificial Sequence
  source: /note="Description of Artificial Sequence: Synthetic peptide"
  MOD_RES (13)..(13): Citrulline
SQSKWGPTSNNPXGAL

SEQ ID NO: 155 - protein, 16 aa, Artificial Sequence
  source: /note="Description of Artificial Sequence: Synthetic peptide"
  MOD_RES (9)..(9): Citrulline
WGPTSNNPXGALTTTE

SEQ ID NO: 156 - protein, 16 aa, Artificial Sequence
  source: /note="Description of Artificial Sequence: Synthetic peptide"
  MOD_RES (7)..(7): Citrulline
FNGHWTXGSTAGGCQN

SEQ ID NO: 157 - protein, 16 aa, Artificial Sequence
  source: /note="Description of Artificial Sequence: Synthetic peptide"
  MOD_RES (3)..(3): Citrulline
WTXGSTAGGCQNYPAT

SEQ ID NO: 158 - protein, 16 aa, Artificial Sequence
  source: /note="Description of Artificial Sequence: Synthetic peptide"
  MOD_RES (7)..(7): Citrulline
ACCLLYXGDVVPKEVN

SEQ ID NO: 159 - protein, 16 aa, Artificial Sequence
  source: /note="Description of Artificial Sequence: Synthetic peptide"
  MOD_RES (3)..(3): Citrulline
LYXGDVVPKEVNAAIA

SEQ ID NO: 160 - protein, 14 aa, Artificial Sequence
  source: /note="Description of Artificial Sequence: Synthetic peptide"
  MOD_RES (7)..(7): Citrulline
GGGGGGXGGGGWGS

SEQ ID NO: 161 - protein, 16 aa, Artificial Sequence
  source: /note="Description of Artificial Sequence: Synthetic peptide"
  MOD_RES (3)..(3): Citrulline
  MOD_RES (15)..(15): Citrulline
GGXGGGGWGSWGGGXG

SEQ ID NO: 162 - protein, 16 aa, Artificial Sequence
  source: /note="Description of Artificial Sequence: Synthetic peptide"
  MOD_RES (1)..(1): Citrulline
  MOD_RES (9)..(9): Citrulline
XLAVPASPXGSPCSPT

SEQ ID NO: 163 - protein, 16 aa, Artificial Sequence
  source: /note="Description of Artificial Sequence: Synthetic peptide"
  MOD_RES (5)..(5): Citrulline
  MOD_RES (14)..(14): Citrulline
PASPXGSPCSPTPXKP

SEQ ID NO: 164 - protein, 16 aa, Artificial Sequence
  source: /note="Description of Artificial Sequence: Synthetic peptide"
  MOD_RES (10)..(10): Citrulline
NYLPPVYSQXGQPLTK

SEQ ID NO: 165 - protein, 16 aa, Artificial Sequence
  source: /note="Description of Artificial Sequence: Synthetic peptide"
  MOD_RES (6)..(6): Citrulline
PVYSQXGQPLTKIQTL

SEQ ID NO: 166 - protein, 16 aa, Artificial Sequence
  source: /note="Description of Artificial Sequence: Synthetic peptide"
  MOD_RES (2)..(2): Citrulline
  MOD_RES (9)..(9): Citrulline
CXHCFPWCXGSGKSNV

SEQ ID NO: 167 - protein, 16 aa, Artificial Sequence
  source: /note="Description of Artificial Sequence: Synthetic peptide"
  MOD_RES (5)..(5): Citrulline
FPWCXGSGKSNVGTSG

SEQ ID NO: 168 - protein, 16 aa, Artificial Sequence
  source: /note="Description of Artificial Sequence: Synthetic peptide"
  MOD_RES (8)..(8): Citrulline
SATEMSGXGSVLASLS

SEQ ID NO: 169 - protein, 16 aa, Artificial Sequence
  source: /note="Description of Artificial Sequence: Synthetic peptide"
  MOD_RES (12)..(12): Citrulline
CNLNHFNAQNIXGSNL

SEQ ID NO: 170 - protein, 16 aa, Artificial Sequence
  source: /note="Description of Artificial Sequence: Synthetic peptide"
  MOD_RES (8)..(8): Citrulline
HFNAQNIXGSNLEETL

SEQ ID NO: 171 - protein, 16 aa, Artificial Sequence
  source: /note="Description of Artificial Sequence: Synthetic peptide"
  MOD_RES (8)..(8): Citrulline
  MOD_RES (14)..(14): Citrulline
TKIQAWWXGTMVQXGF

SEQ ID NO: 172 - protein, 16 aa, Artificial Sequence
  source: /note="Description of Artificial Sequence: Synthetic peptide"
  MOD_RES (4)..(4): Citrulline
  MOD_RES (10)..(10): Citrulline
AWWXGTMVQXGFGKFG

SEQ ID NO: 173 - protein, 16 aa, Artificial Sequence
  source: /note="Description of Artificial Sequence: Synthetic peptide"
  MOD_RES (5)..(5): Citrulline
  MOD_RES (14)..(14): Citrulline
VGSAXSSVSSLGSXGS

SEQ ID NO: 174 - protein, 16 aa, Artificial Sequence
  source: /note="Description of Artificial Sequence: Synthetic peptide"
  MOD_RES (1)..(1): Citrulline
  MOD_RES (10)..(10): Citrulline
XSSVSSLGSXGSAGAY

SEQ ID NO: 175 - protein, 16 aa, Artificial Sequence
  source: /note="Description of Artificial Sequence: Synthetic peptide"
  MOD_RES (8)..(8): Citrulline
  MOD_RES (15)..(15): Citrulline
SSMPTAHXGSLAPPXG

SEQ ID NO: 176 - protein, 16 aa, Artificial Sequence
  source: /note="Description of Artificial Sequence: Synthetic peptide"
  MOD_RES (4)..(4): Citrulline
  MOD_RES (11)..(11): Citrulline
TAHXGSLAPPXGPWPP

SEQ ID NO: 177 - protein, 16 aa, Artificial Sequence
  source: /note="Description of Artificial Sequence: Synthetic peptide"
  MOD_RES (9)..(9): Citrulline
GAAVAAVEXGAAGLPK

SEQ ID NO: 178 - protein, 16 aa, Artificial Sequence
  source: /note="Description of Artificial Sequence: Synthetic peptide"
  MOD_RES (5)..(5): Citrulline
AAVEXGAAGLPKASPF

SEQ ID NO: 179 - protein, 16 aa, Artificial Sequence
  source: /note="Description of Artificial Sequence: Synthetic peptide"
  MOD_RES (10)..(10): Citrulline
  MOD_RES (16)..(16): Citrulline
DDLFSFMQKXGTPVNX

SEQ ID NO: 180 - protein, 16 aa, Artificial Sequence
  source: /note="Description of Artificial Sequence: Synthetic peptide"
  MOD_RES (6)..(6): Citrulline
  MOD_RES (12)..(12): Citrulline
SFMQKXGTPVNXVPIM

SEQ ID NO: 181 - protein, 16 aa, Artificial Sequence
  source: /note="Description of Artificial Sequence: Synthetic peptide"
  MOD_RES (9)..(9): Citrulline
GFLSYVQSXGLELKPG

SEQ ID NO: 182 - protein, 16 aa, Artificial Sequence
  source: /note="Description of Artificial Sequence: Synthetic peptide"
  MOD_RES (5)..(5): Citrulline
YVQSXGLELKPGGCGG

SEQ ID NO: 183 - protein, 16 aa, Artificial Sequence
  source: /note="Description of Artificial Sequence: Synthetic peptide"
  MOD_RES (2)..(2): Citrulline
  MOD_RES (13)..(13): Citrulline
YXYDKDVGQWKEXGIG

SEQ ID NO: 184 - protein, 16 aa, Artificial Sequence
  source: /note="Description of Artificial Sequence: Synthetic peptide"
  MOD_RES (9)..(9): Citrulline
KDVGQWKEXGIGDIKI

SEQ ID NO: 185 - protein, 16 aa, Artificial Sequence
  source: /note="Description of Artificial Sequence: Synthetic peptide"
  MOD_RES (3)..(3): Citrulline
  MOD_RES (10)..(10): Citrulline
PWXPFFAHKXGSQDDQ

SEQ ID NO: 186 - protein, 16 aa, Artificial Sequence
  source: /note="Description of Artificial Sequence: Synthetic peptide"
  MOD_RES (6)..(6): Citrulline
FFAHKXGSQDDQSILS

SEQ ID NO: 187 - protein, 16 aa, Artificial Sequence
  source: /note="Description of Artificial Sequence: Synthetic peptide"
  MOD_RES (2)..(2): Citrulline
  MOD_RES (9)..(9): Citrulline
SXTTSEPGXGDKSPPP

SEQ ID NO: 188 - protein, 16 aa, Artificial Sequence
  source: /note="Description of Artificial Sequence: Synthetic peptide"
  MOD_RES (7)..(7): Citrulline
  MOD_RES (13)..(13): Citrulline
KEGQAAXSSVLQXGAQ

SEQ ID NO: 189 - protein, 16 aa, Artificial Sequence
  source: /note="Description of Artificial Sequence: Synthetic peptide"
  MOD_RES (3)..(3): Citrulline
  MOD_RES (9)..(9): Citrulline
AAXSSVLQXGAQGLGQ

SEQ ID NO: 190 - protein, 16 aa, Artificial Sequence
  source: /note="Description of Artificial Sequence: Synthetic peptide"
  MOD_RES (5)..(5): Citrulline
SVLQXGAQGLGQSSAA

SEQ ID NO: 191 - protein, 16 aa, Artificial Sequence
  source: /note="Description of Artificial Sequence: Synthetic peptide"
  MOD_RES (7)..(7): Citrulline
  MOD_RES (9)..(9): Citrulline
LGATLLXLXGATLAAP

SEQ ID NO: 192 - protein, 16 aa, Artificial Sequence
  source: /note="Description of Artificial Sequence: Synthetic peptide"
  MOD_RES (3)..(3): Citrulline
  MOD_RES (5)..(5): Citrulline
LLXLXGATLAAPGAAE

SEQ ID NO: 193 - protein, 16 aa, Artificial Sequence
  source: /note="Description of Artificial Sequence: Synthetic peptide"
  MOD_RES (11)..(11): Citrulline
FYVALPDSPAXGQILQ

SEQ ID NO: 194 - protein, 16 aa, Artificial Sequence
  source: /note="Description of Artificial Sequence: Synthetic peptide"
  MOD_RES (7)..(7): Citrulline
  MOD_RES (13)..(13): Citrulline
LPDSPAXGQILQXALA

SEQ ID NO: 195 - protein, 16 aa, Artificial Sequence
  source: /note="Description of Artificial Sequence: Synthetic peptide"
  MOD_RES (11)..(11): Citrulline
  MOD_RES (14)..(14): Citrulline
GFSDHMFTEAXGSXLN

SEQ ID NO: 196 - protein, 16 aa, Artificial Sequence
  source: /note="Description of Artificial Sequence: Synthetic peptide"
  MOD_RES (7)..(7): Citrulline
  MOD_RES (10)..(10): Citrulline
HMFTEAXGSXLNKGVP

SEQ ID NO: 197 - protein, 16 aa, Artificial Sequence
  source: /note="Description of Artificial Sequence: Synthetic peptide"
  MOD_RES (4)..(4): Citrulline
  MOD_RES (9)..(9): Citrulline
PLGXSWMGXGSQEQME

SEQ ID NO: 198 - protein, 16 aa, Artificial Sequence
  source: /note="Description of Artificial Sequence: Synthetic peptide"
  MOD_RES (5)..(5): Citrulline
SWMGXGSQEQMESWEP

SEQ ID NO: 199 - protein, 16 aa, Artificial Sequence
  source: /note="Description of Artificial Sequence: Synthetic peptide"
  MOD_RES (5)..(5): Citrulline
  MOD_RES (13)..(13): Citrulline
HVPGXPGSVTFMXGDK

SEQ ID NO: 200 - protein, 16 aa, Artificial Sequence
  source: /note="Description of Artificial Sequence: Synthetic peptide"
  MOD_RES (1)..(1): Citrulline
  MOD_RES (9)..(9): Citrulline
XPGSVTFMXGDKGQKS

SEQ ID NO: 201 - protein, 16 aa, Artificial Sequence
  source: /note="Description of Artificial Sequence: Synthetic peptide"
  MOD_RES (8)..(8): Citrulline
SAAEMSGXGSVLASLS

SEQ ID NO: 202 - protein, 16 aa, Artificial Sequence
  source: /note="Description of Artificial Sequence: Synthetic peptide"
  MOD_RES (5)..(5): Citrulline
  MOD_RES (10)..(10): Citrulline
LYKGXVNSQXGAQPLA

SEQ ID NO: 203 - protein, 16 aa, Artificial Sequence
  source: /note="Description of Artificial Sequence: Synthetic peptide"
  MOD_RES (1)..(1): Citrulline
  MOD_RES (6)..(6): Citrulline
XVNSQXGAQPLAVAKE

SEQ ID NO: 204 - protein, 16 aa, Artificial Sequence
  source: /note="Description of Artificial Sequence: Synthetic peptide"
  MOD_RES (8)..(8): Citrulline
  MOD_RES (14)..(14): Citrulline
GFAPLTSXGSQQYXAL

SEQ ID NO: 205 - protein, 16 aa, Artificial Sequence
  source: /note="Description of Artificial Sequence: Synthetic peptide"
  MOD_RES (11)..(11): Citrulline
VKTAVCDIPPXGLKMS

SEQ ID NO: 206 - protein, 16 aa, Artificial Sequence
  source: /note="Description of Artificial Sequence: Synthetic peptide"
  MOD_RES (2)..(2): Citrulline
  MOD_RES (9)..(9): Citrulline
FXEGQQYGXGKSGGQV

SEQ ID NO: 207 - protein, 16 aa, Artificial Sequence
  source: /note="Description of Artificial Sequence: Synthetic peptide"
  MOD_RES (5)..(5): Citrulline
  MOD_RES (13)..(13): Citrulline
QQYGXGKSGGQVXDEF

SEQ ID NO: 208 - protein, 16 aa, Artificial Sequence
  source: /note="Description of Artificial Sequence: Synthetic peptide"
  MOD_RES (12)..(12): Citrulline
SDEKDSFSNITXGKKD

SEQ ID NO: 209 - protein, 16 aa, Artificial Sequence
  source: /note="Description of Artificial Sequence: Synthetic peptide"
  MOD_RES (8)..(8): Citrulline
DSFSNITXGKKDGEIS

SEQ ID NO: 210 - protein, 16 aa, Artificial Sequence
  source: /note="Description of Artificial Sequence: Synthetic peptide"
  MOD_RES (10)..(10): Citrulline
KECLISQLSXGKALAA

SEQ ID NO: 211 - protein, 16 aa, Artificial Sequence
  source: /note="Description of Artificial Sequence: Synthetic peptide"
  MOD_RES (6)..(6): Citrulline
ISQLSXGKALAAQSLE

SEQ ID NO: 212 - protein, 16 aa, Artificial Sequence
  source: /note="Description of Artificial Sequence: Synthetic peptide"
  MOD_RES (8)..(8): Citrulline
  MOD_RES (12)..(12): Citrulline
SSSHNTLXPAPXGSAQ

SEQ ID NO: 213 - protein, 16 aa, Artificial Sequence
  source: /note="Description of Artificial Sequence: Synthetic peptide"
  MOD_RES (4)..(4): Citrulline
  MOD_RES (8)..(8): Citrulline
NTLXPAPXGSAQESAV

SEQ ID NO: 214 - protein, 16 aa, Artificial Sequence
  source: /note="Description of Artificial Sequence: Synthetic peptide"
  MOD_RES (10)..(10): Citrulline
HHSSLSWKGXGGPGDG

SEQ ID NO: 215 - protein, 16 aa, Artificial Sequence
  source: /note="Description of Artificial Sequence: Synthetic peptide"
  MOD_RES (6)..(6): Citrulline
LSWKGXGGPGDGSPVV

SEQ ID NO: 216 - protein, 16 aa, Artificial Sequence
  source: /note="Description of Artificial Sequence: Synthetic peptide"
  MOD_RES (11)..(11): Citrulline
PLQMLGYLSAXGVITG

SEQ ID NO: 217 - protein, 16 aa, Artificial Sequence
  source: /note="Description of Artificial Sequence: Synthetic peptide"
  MOD_RES (7)..(7): Citrulline
LGYLSAXGVITGSGSA

SEQ ID NO: 218 - protein, 16 aa, Artificial Sequence
  source: /note="Description of Artificial Sequence: Synthetic peptide"
  MOD_RES (7)..(7): Citrulline
  MOD_RES (9)..(9): Citrulline
SPLTTSXGXSQEYDSG

SEQ ID NO: 219 - protein, 16 aa, Artificial Sequence
  source: /note="Description of Artificial Sequence: Synthetic peptide"
  MOD_RES (7)..(7): Citrulline
  MOD_RES (9)..(9): Citrulline
TQTSSAXSXGQEKGSP

SEQ ID NO: 220 - protein, 16 aa, Artificial Sequence
  source: /note="Description of Artificial Sequence: Synthetic peptide"
  MOD_RES (3)..(3): Citrulline
  MOD_RES (5)..(5): Citrulline
SAXSXGQEKGSPSGGL

SEQ ID NO: 221 - protein, 16 aa, Artificial Sequence
  source: /note="Description of Artificial Sequence: Synthetic peptide"
  MOD_RES (6)..(6): Citrulline
  MOD_RES (14)..(14): Citrulline
SYSSTXGISQLWKXNG

SEQ ID NO: 222 - protein, 16 aa, Artificial Sequence
  source: /note="Description of Artificial Sequence: Synthetic peptide"
  MOD_RES (2)..(2): Citrulline
  MOD_RES (10)..(10): Citrulline
TXGISQLWKXNGPSSS

SEQ ID NO: 223 - protein, 16 aa, Artificial Sequence
  source: /note="Description of Artificial Sequence: Synthetic peptide"
  MOD_RES (7)..(8): Citrulline
VQLLPSXXGEQLTLPP

SEQ ID NO: 224 - protein, 16 aa, Artificial Sequence
  source: /note="Description of Artificial Sequence: Synthetic peptide"
  MOD_RES (3)..(4): Citrulline
PSXXGEQLTLPPPPQL

SEQ ID NO: 225 - protein, 16 aa, Artificial Sequence
  source: /note="Description of Artificial Sequence: Synthetic peptide"
  MOD_RES (9)..(9): Citrulline
TCKILIETXGSEQGEK

SEQ ID NO: 226 - protein, 16 aa, Artificial Sequence
  source: /note="Description of Artificial Sequence: Synthetic peptide"
  MOD_RES (5)..(5): Citrulline
  MOD_RES (15)..(15): Citrulline
LIETXGSEQGEKSDXV

SEQ ID NO: 227 - protein, 16 aa, Artificial Sequence
  source: /note="Description of Artificial Sequence: Synthetic peptide"
  MOD_RES (10)..(10): Citrulline
  MOD_RES (16)..(16): Citrulline
TDLYKFLTKXGEKMTX

SEQ ID NO: 228 - protein, 16 aa, Artificial Sequence
  source: /note="Description of Artificial Sequence: Synthetic peptide"
  MOD_RES (6)..(6): Citrulline
  MOD_RES (12)..(12): Citrulline
KFLTKXGEKMTXEEVN

SEQ ID NO: 229 - protein, 16 aa, Artificial Sequence
  source: /note="Description of Artificial Sequence: Synthetic peptide"
  MOD_RES (3)..(3): Citrulline
  MOD_RES (8)..(8): Citrulline
PVXIPHLXGKFNLQLP

SEQ ID NO: 230 - protein, 16 aa, Artificial Sequence
  source: /note="Description of Artificial Sequence: Synthetic peptide"
  MOD_RES (11)..(11): Citrulline
  MOD_RES (16)..(16): Citrulline
LDKGTWDAVAXGGLPX

SEQ ID NO: 231 - protein, 16 aa, Artificial Sequence
  source: /note="Description of Artificial Sequence: Synthetic peptide"
  MOD_RES (7)..(7): Citrulline
  MOD_RES (12)..(12): Citrulline
TWDAVAXGGLPXAYQL

SEQ ID NO: 232 - protein, 16 aa, Artificial Sequence
  source: /note="Description of Artificial Sequence: Synthetic peptide"
  MOD_RES (6)..(6): Citrulline
  MOD_RES (9)..(9): Citrulline
PQMEWXESXGEIIPPA

SEQ ID NO: 233 - protein, 16 aa, Artificial Sequence
  source: /note="Description of Artificial Sequence: Synthetic peptide"
  MOD_RES (2)..(2): Citrulline
  MOD_RES (5)..(5): Citrulline
WXESXGEIIPPASKSH

SEQ ID NO: 234 - protein, 16 aa, Artificial Sequence
  source: /note="Description of Artificial Sequence: Synthetic peptide"
  MOD_RES (1)..(1): Citrulline
  MOD_RES (10)..(10): Citrulline
XNPLEVINTXGIKLGT

SEQ ID NO: 235 - protein, 16 aa, Artificial Sequence
  source: /note="Description of Artificial Sequence: Synthetic peptide"
  MOD_RES (6)..(6): Citrulline
EVINTXGIKLGTKYSD

SEQ ID NO: 236 - protein, 16 aa, Artificial Sequence
  source: /note="Description of Artificial Sequence: Synthetic peptide"
  MOD_RES (12)..(12): Citrulline
  MOD_RES (14)..(14): Citrulline
MDMDGEQKWQYXGXTT

SEQ ID NO: 237 - protein, 16 aa, Artificial Sequence
  source: /note="Description of Artificial Sequence: Synthetic peptide"
  MOD_RES (8)..(8): Citrulline
  MOD_RES (10)..(10): Citrulline
GEQKWQYXGXTTFMSD

SEQ ID NO: 238 - protein, 16 aa, Artificial Sequence
  source: /note="Description of Artificial Sequence: Synthetic peptide"
  MOD_RES (2)..(2): Citrulline
  MOD_RES (12)..(12): Citrulline
GXTTFMSDHVAXGKAM

SEQ ID NO: 239 - protein, 16 aa, Artificial Sequence
  source: /note="Description of Artificial Sequence: Synthetic peptide"
  MOD_RES (8)..(8): Citrulline
  MOD_RES (14)..(14): Citrulline
FMSDHVAXGKAMVXSH

SEQ ID NO: 240 - protein, 16 aa, Artificial Sequence
  source: /note="Description of Artificial Sequence: Synthetic peptide"
  MOD_RES (11)..(11): Citrulline
DGCNNSSWIPXGNYIE

SEQ ID NO: 241 - protein, 16 aa, Artificial Sequence
  source: /note="Description of Artificial Sequence: Synthetic peptide"
  MOD_RES (7)..(7): Citrulline
  MOD_RES (15)..(15): Citrulline
NSSWIPXGNYIESNXD

SEQ ID NO: 242 - protein, 16 aa, Artificial Sequence
  source: /note="Description of Artificial Sequence: Synthetic peptide"
  MOD_RES (4)..(4): Citrulline
  MOD_RES (12)..(12): Citrulline
LADXSATAMSGXGSVL

SEQ ID NO: 243 - protein, 16 aa, Artificial Sequence
  source: /note="Description of Artificial Sequence: Synthetic peptide"
  MOD_RES (8)..(8): Citrulline
SATAMSGXGSVLASLS

SEQ ID NO: 244 - protein, 16 aa, Artificial Sequence
  source: /note="Description of Artificial Sequence: Synthetic peptide"
  MOD_RES (13)..(13): Citrulline
  MOD_RES (16)..(16): Citrulline
GQWACSEPSSWTXGQX

SEQ ID NO: 245 - protein, 16 aa, Artificial Sequence
  source: /note="Description of Artificial Sequence: Synthetic peptide"
  MOD_RES (9)..(9): Citrulline
  MOD_RES (12)..(12): Citrulline
CSEPSSWTXGQXACSE

SEQ ID NO: 246 - protein, 16 aa, Artificial Sequence
  source: /note="Description of Artificial Sequence: Synthetic peptide"
  MOD_RES (5)..(5): Citrulline
  MOD_RES (8)..(8): Citrulline
SSWTXGQXACSEPSPW

SEQ ID NO: 247 - protein, 16 aa, Artificial Sequence
  source: /note="Description of Artificial Sequence: Synthetic peptide"
  MOD_RES (11)..(11): Citrulline
CPGIPGPHGTXGLQAM

SEQ ID NO: 248 - protein, 16 aa, Artificial Sequence
  source: /note="Description of Artificial Sequence: Synthetic peptide"
  MOD_RES (7)..(7): Citrulline
PGPHGTXGLQAMKGSQ

SEQ ID NO: 249 - protein, 16 aa, Artificial Sequence
  source: /note="Description of Artificial Sequence: Synthetic peptide"
  MOD_RES (7)..(7): Citrulline
QGSPGSXGAPGQYGEK

SEQ ID NO: 250 - protein, 16 aa, Artificial Sequence
  source: /note="Description of Artificial Sequence: Synthetic peptide"
  MOD_RES (3)..(3): Citrulline
GSXGAPGQYGEKGFPG

SEQ ID NO: 251 - protein, 16 aa, Artificial Sequence
  source: /note="Description of Artificial Sequence: Synthetic peptide"
  MOD_RES (7)..(7): Citrulline
  MOD_RES (11)..(11): Citrulline
PQPGAQXFATXGYPME

SEQ ID NO: 252 - protein, 16 aa, Artificial Sequence
  source: /note="Description of Artificial Sequence: Synthetic peptide"
  MOD_RES (3)..(3): Citrulline
  MOD_RES (7)..(7): Citrulline
AQXFATXGYPMEDMKL

SEQ ID NO: 253 - protein, 16 aa, Artificial Sequence
  source: /note="Description of Artificial Sequence: Synthetic peptide"
  MOD_RES (3)..(3): Citrulline
ATXGYPMEDMKLQGVP

SEQ ID NO: 254 - protein, 16 aa, Artificial Sequence
  source: /note="Description of Artificial Sequence: Synthetic peptide"
  MOD_RES (8)..(8): Citrulline
  MOD_RES (10)..(10): Citrulline
IKVTLSVXAXGDLPPP

SEQ ID NO: 255 - protein, 16 aa, Artificial Sequence
  source: /note="Description of Artificial Sequence: Synthetic peptide"
  MOD_RES (4)..(4): Citrulline
  MOD_RES (11)..(11): Citrulline
FQLXAHLYQAXGVLAA

SEQ ID NO: 256 - protein, 16 aa, Artificial Sequence
  source: /note="Description of Artificial Sequence: Synthetic peptide"
  MOD_RES (7)..(7): Citrulline
AHLYQAXGVLAADDSG

SEQ ID NO: 257 - protein, 16 aa, Artificial Sequence
  source: /note="Description of Artificial Sequence: Synthetic peptide"
  MOD_RES (10)..(10): Citrulline
MLNPELGLPXGTIGKP

SEQ ID NO: 258 - protein, 16 aa, Artificial Sequence
  source: /note="Description of Artificial Sequence: Synthetic peptide"
  MOD_RES (6)..(6): Citrulline
ELGLPXGTIGKPTPPP

SEQ ID NO: 259 - protein, 16 aa, Artificial Sequence
  source: /note="Description of Artificial Sequence: Synthetic peptide"
  MOD_RES (2)..(2): Citrulline
PXGTIGKPTPPPPPPS

SEQ ID NO: 260 - protein, 16 aa, Artificial Sequence
  source: /note="Description of Artificial Sequence: Synthetic peptide"
  MOD_RES (3)..(3): Citrulline
  MOD_RES (9)..(9): Citrulline
CPXLGPAAXGSLEGPS

SEQ ID NO: 261 - protein, 16 aa, Artificial Sequence
  source: /note="Description of Artificial Sequence: Synthetic peptide"
  MOD_RES (5)..(5): Citrulline
GPAAXGSLEGPSAPPQ

SEQ ID NO: 262 - protein, 16 aa, Artificial Sequence
  source: /note="Description of Artificial Sequence: Synthetic peptide"
  MOD_RES (12)..(12): Citrulline
CCYGDNMQLITXGKGA

SEQ ID NO: 263 - protein, 16 aa, Artificial Sequence
  source: /note="Description of Artificial Sequence: Synthetic peptide"
  MOD_RES (8)..(8): Citrulline
DNMQLITXGKGAGTPN

SEQ ID NO: 264 - protein, 16 aa, Artificial Sequence
  source: /note="Description of Artificial Sequence: Synthetic peptide"
  MOD_RES (4)..(4): Citrulline
LITXGKGAGTPNLIST

SEQ ID NO: 265 - protein, 16 aa, Artificial Sequence
  source: /note="Description of Artificial Sequence: Synthetic peptide"
  MOD_RES (2)..(2): Citrulline
  MOD_RES (10)..(10): Citrulline
VXNPAECNVXGKFLLC

SEQ ID NO: 266 - protein, 16 aa, Artificial Sequence
  source: /note="Description of Artificial Sequence: Synthetic peptide"
  MOD_RES (6)..(6): Citrulline
  MOD_RES (15)..(15): Citrulline
AECNVXGKFLLCMKXE

SEQ ID NO: 267 - protein, 16 aa, Artificial Sequence
  source: /note="Description of Artificial Sequence: Synthetic peptide"
  MOD_RES (2)..(2): Citrulline
  MOD_RES (11)..(11): Citrulline
VXGKFLLCMKXENPYA

SEQ ID NO: 268 - protein, 16 aa, Artificial Sequence
  source: /note="Description of Artificial Sequence: Synthetic peptide"
  MOD_RES (7)..(7): Citrulline
  MOD_RES (13)..(13): Citrulline
FLLCMKXENPYAXGKP

SEQ ID NO: 269 - protein, 16 aa, Artificial Sequence
  source: /note="Description of Artificial Sequence: Synthetic peptide"
  MOD_RES (3)..(3): Citrulline
  MOD_RES (9)..(9): Citrulline
MKXENPYAXGKPLEYD

SEQ ID NO: 270 - protein, 16 aa, Artificial Sequence
  source: /note="Description of Artificial Sequence: Synthetic peptide"
  MOD_RES (5)..(5): Citrulline
NPYAXGKPLEYDGNGK

SEQ ID NO: 271 - protein, 16 aa, Artificial Sequence
  source: /note="Description of Artificial Sequence: Synthetic peptide"
  MOD_RES (1)..(1): Citrulline
XGKPLEYDGNGKAVSQ

SEQ ID NO: 272 - protein, 16 aa, Artificial Sequence
  source: /note="Description of Artificial Sequence: Synthetic peptide"
  MOD_RES (2)..(2): Citrulline
  MOD_RES (12)..(12): Citrulline
GXKLQPSEWAGXGDLG

SEQ ID NO: 273 - protein, 16 aa, Artificial Sequence
  source: /note="Description of Artificial Sequence: Synthetic peptide"
  MOD_RES (8)..(8): Citrulline
  MOD_RES (16)..(16): Citrulline
QPSEWAGXGDLGGFKX

SEQ ID NO: 274 - protein, 16 aa, Artificial Sequence
  source: /note="Description of Artificial Sequence: Synthetic peptide"
  MOD_RES (13)..(13): Citrulline
DSSGGKSSSSFAXGAL

SEQ ID NO: 275 - protein, 16 aa, Artificial Sequence
  source: /note="Description of Artificial Sequence: Synthetic peptide"
  MOD_RES (9)..(9): Citrulline
  MOD_RES (16)..(16): Citrulline
GKSSSSFAXGALAWCX

SEQ ID NO: 276 - protein, 16 aa, Artificial Sequence
  source: /note="Description of Artificial Sequence: Synthetic peptide"
  MOD_RES (10)..(10): Citrulline
AAFQGGCTYXGMFSEG

SEQ ID NO: 277 - protein, 16 aa, Artificial Sequence
  source: /note="Description of Artificial Sequence: Synthetic peptide"
  MOD_RES (14)..(14): Citrulline
QTKFLEDKPQFISXGT

SEQ ID NO: 278 - protein, 16 aa, Artificial Sequence
  source: /note="Description of Artificial Sequence: Synthetic peptide"
  MOD_RES (10)..(10): Citrulline
LEDKPQFISXGTFNPE

SEQ ID NO: 279 - protein, 16 aa, Artificial Sequence
  source: /note="Description of Artificial Sequence: Synthetic peptide"
  MOD_RES (6)..(6): Citrulline
PQFISXGTFNPEKGKQ

SEQ ID NO: 280 - protein, 16 aa, Artificial Sequence
  source: /note="Description of Artificial Sequence: Synthetic peptide"
  MOD_RES (10)..(10): Citrulline
WCCHCFPCCXGSGKSN

SEQ ID NO: 281 - protein, 16 aa, Artificial Sequence
  source: /note="Description of Artificial Sequence: Synthetic peptide"
  MOD_RES (6)..(6): Citrulline
CFPCCXGSGKSNVGAW

SEQ ID NO: 282 - protein, 16 aa, Artificial Sequence
  source: /note="Description of Artificial Sequence: Synthetic peptide"
  MOD_RES (6)..(6): Citrulline
PQNLSXGMESFPGKVL

SEQ ID NO: 283 - protein, 16 aa, Artificial Sequence
  source: /note="Description of Artificial Sequence: Synthetic peptide"
  MOD_RES (6)..(6): Citrulline
  MOD_RES (10)..(10): Citrulline
QYEHTXSVGXGSSLQV

SEQ ID NO: 284 - protein, 16 aa, Artificial Sequence
  source: /note="Description of Artificial Sequence: Synthetic peptide"
  MOD_RES (2)..(2): Citrulline
  MOD_RES (6)..(6): Citrulline
TXSVGXGSSLQVENEI

SEQ ID NO: 285 - protein, 16 aa, Artificial Sequence
  source: /note="Description of Artificial Sequence: Synthetic peptide"
  MOD_RES (10)..(10): Citrulline
VNWMKEDAKXGTQIGY

SEQ ID NO: 286 - protein, 16 aa, Artificial Sequence
  source: /note="Description of Artificial Sequence: Synthetic peptide"
  MOD_RES (6)..(6): Citrulline
  MOD_RES (13)..(13): Citrulline
KEDAKXGTQIGYXIYD

SEQ ID NO: 287 - protein, 16 aa, Artificial Sequence
  source: /note="Description of Artificial Sequence: Synthetic peptide"
  MOD_RES (10)..(10): Citrulline
QVQMGDGLPXGSPHNS

SEQ ID NO: 288 - protein, 16 aa, Artificial Sequence
  source: /note="Description of Artificial Sequence: Synthetic peptide"
  MOD_RES (6)..(6): Citrulline
  MOD_RES (16)..(16): Citrulline
GDGLPXGSPHNSAGPX

SEQ ID NO: 289 - protein, 16 aa, Artificial Sequence
  source: /note="Description of Artificial Sequence: Synthetic peptide"
  MOD_RES (10)..(10): Citrulline
  MOD_RES (13)..(13): Citrulline
DDAVLQHATXGSXSCG

SEQ ID NO: 290 - protein, 16 aa, Artificial Sequence
  source: /note="Description of Artificial Sequence: Synthetic peptide"
  MOD_RES (6)..(6): Citrulline
  MOD_RES (9)..(9): Citrulline
LQHATXGSXSCGPTEA

SEQ ID NO: 291 - protein, 16 aa, Artificial Sequence
  source: /note="Description of Artificial Sequence: Synthetic peptide"
  MOD_RES (7)..(7): Citrulline
EEPQGFXGSFAASPGP

SEQ ID NO: 292 - protein, 16 aa, Artificial Sequence
  source: /note="Description of Artificial Sequence: Synthetic peptide"
  MOD_RES (3)..(3): Citrulline
GFXGSFAASPGPTFDA

SEQ ID NO: 293 - protein, 16 aa, Artificial Sequence
  source: /note="Description of Artificial Sequence: Synthetic peptide"
  MOD_RES (4)..(4): Citrulline
  MOD_RES (9)..(9): Citrulline
MDSXKLSPXGKKLESH

SEQ ID NO: 294 - protein, 16 aa, Artificial Sequence
  source: /note="Description of Artificial Sequence: Synthetic peptide"
  MOD_RES (5)..(5): Citrulline
KLSPXGKKLESHLSQE

SEQ ID NO: 295 - protein, 16 aa, Artificial Sequence
  source: /note="Description of Artificial Sequence: Synthetic peptide"
  MOD_RES (10)..(10): Citrulline
CGFMVPEAAXGKVFQD

SEQ ID NO: 296 - protein, 16 aa, Artificial Sequence
  source: /note="Description of Artificial Sequence: Synthetic peptide"
  MOD_RES (6)..(6): Citrulline
VPEAAXGKVFQDSQEG

SEQ ID NO: 297 - protein, 16 aa, Artificial Sequence
  source: /note="Description of Artificial Sequence: Synthetic peptide"
  MOD_RES (9)..(9): Citrulline
  MOD_RES (11)..(11): Citrulline
EAHSQEALXTXGFLEL

SEQ ID NO: 298 - protein, 16 aa, Artificial Sequence
  source: /note="Description of Artificial Sequence: Synthetic peptide"
  MOD_RES (5)..(5): Citrulline
  MOD_RES (7)..(7): Citrulline
QEALXTXGFLELSAAA

SEQ ID NO: 299 - protein, 16 aa, Artificial Sequence
  source: /note="Description of Artificial Sequence: Synthetic peptide"
  MOD_RES (14)..(14): Citrulline
FTSGLSGVLGAATXGT

SEQ ID NO: 300 - protein, 16 aa, Artificial Sequence
  source: /note="Description of Artificial Sequence: Synthetic peptide"
  MOD_RES (10)..(10): Citrulline
  MOD_RES (14)..(14): Citrulline
LSGVLGAATXGTAXTS

SEQ ID NO: 301 - protein, 16 aa, Artificial Sequence
  source: /note="Description of Artificial Sequence: Synthetic peptide"
  MOD_RES (6)..(6): Citrulline
  MOD_RES (10)..(10): Citrulline
LGAATXGTAXTSKPTT

SEQ ID NO: 302 - protein, 16 aa, Artificial Sequence
  source: /note="Description of Artificial Sequence: Synthetic peptide"
  MOD_RES (9)..(9): Citrulline
SATSKKAVXGTADTAP

SEQ ID NO: 303 - protein, 16 aa, Artificial Sequence
  source: /note="Description of Artificial Sequence: Synthetic peptide"
  MOD_RES (5)..(5): Citrulline
  MOD_RES (15)..(15): Citrulline
KKAVXGTADTAPLEXI

SEQ ID NO: 304 - protein, 16 aa, Artificial Sequence
  source: /note="Description of Artificial Sequence: Synthetic peptide"
  MOD_RES (7)..(7): Citrulline
  MOD_RES (12)..(12): Citrulline
PAAPQSXGNAVXPASV

SEQ ID NO: 305 - protein, 16 aa, Artificial Sequence
  source: /note="Description of Artificial Sequence: Synthetic peptide"
  MOD_RES (11)..(11): Citrulline
  MOD_RES (15)..(15): Citrulline
MKWSTNSCGAXGACXI

SEQ ID NO: 306 - protein, 16 aa, Artificial Sequence
  source: /note="Description of Artificial Sequence: Synthetic peptide"
  MOD_RES (7)..(7): Citrulline
  MOD_RES (11)..(11): Citrulline
TNSCGAXGACXIYNST

SEQ ID NO: 307 - protein, 16 aa, Artificial Sequence
  source: /note="Description of Artificial Sequence: Synthetic peptide"
  MOD_RES (12)..(12): Citrulline
CQKEAGKFGTHXGKPM

SEQ ID NO: 308 - protein, 16 aa, Artificial Sequence
  source: /note="Description of Artificial Sequence: Synthetic peptide"
  MOD_RES (9)..(9): Citrulline
  MOD_RES (13)..(13): Citrulline
LACEVGPGXGPQXGSW

SEQ ID NO: 309 - protein, 16 aa, Artificial Sequence
  source: /note="Description of Artificial Sequence: Synthetic peptide"
  MOD_RES (10)..(10): Citrulline
VVHIKMVTPXGIIEKS

SEQ ID NO: 310 - protein, 16 aa, Artificial Sequence
  source: /note="Description of Artificial Sequence: Synthetic peptide"
  MOD_RES (6)..(6): Citrulline
KMVTPXGIIEKSCQGP

SEQ ID NO: 311 - protein, 16 aa, Artificial Sequence
  source: /note="Description of Artificial Sequence: Synthetic peptide"
  MOD_RES (3)..(3): Citrulline
  MOD_RES (10)..(10): Citrulline
ALXCFGPGSXGSPASG

SEQ ID NO: 312 - protein, 16 aa, Artificial Sequence
  source: /note="Description of Artificial Sequence: Synthetic peptide"
  MOD_RES (6)..(6): Citrulline
  MOD_RES (16)..(16): Citrulline
FGPGSXGSPASGPGPX

SEQ ID NO: 313 - protein, 16 aa, Artificial Sequence
  source: /note="Description of Artificial Sequence: Synthetic peptide"
  MOD_RES (15)..(15): Citrulline
ILNKYDDNVKAYFKXG

SEQ ID NO: 314 - protein, 16 aa, Artificial Sequence
  source: /note="Description of Artificial Sequence: Synthetic peptide"
  MOD_RES (11)..(11): Citrulline
YDDNVKAYFKXGKAHA

SEQ ID NO: 315 - protein, 16 aa, Artificial Sequence
  source: /note="Description of Artificial Sequence: Synthetic peptide"
  MOD_RES (13)..(13): Citrulline
KCTAAYEKPPYPXGSV

SEQ ID NO: 316 - protein, 16 aa, Artificial Sequence
  source: /note="Description of Artificial Sequence: Synthetic peptide"
  MOD_RES (9)..(9): Citrulline
AYEKPPYPXGSVTANM

SEQ ID NO: 317 - protein, 16 aa, Artificial Sequence
  source: /note="Description of Artificial Sequence: Synthetic peptide"
  MOD_RES (5)..(5): Citrulline
PPYPXGSVTANMLCAG

SEQ ID NO: 318 - protein, 16 aa, Artificial Sequence
  source: /note="Description of Artificial Sequence: Synthetic peptide"
  MOD_RES (8)..(8): Citrulline
VWSYKELXGTLQKDGW

SEQ ID NO: 319 - protein, 16 aa, Artificial Sequence
  source: /note="Description of Artificial Sequence: Synthetic peptide"
  MOD_RES (4)..(4): Citrulline
  MOD_RES (16)..(16): Citrulline
KELXGTLQKDGWTKAX

SEQ ID NO: 320 - protein, 16 aa, Artificial Sequence
  source: /note="Description of Artificial Sequence: Synthetic peptide"
  MOD_RES (2)..(2): Citrulline
  MOD_RES (12)..(12): Citrulline
GXYGEVWMGKWXGEKV

SEQ ID NO: 321 - protein, 16 aa, Artificial Sequence
  source: /note="Description of Artificial Sequence: Synthetic peptide"
  MOD_RES (5)..(5): Citrulline
  MOD_RES (10)..(10): Citrulline
HSTAXVVLTXGDVHSQ

SEQ ID NO: 322 - protein, 16 aa, Artificial Sequence
  source: /note="Description of Artificial Sequence: Synthetic peptide"
  MOD_RES (11)..(11): Citrulline
CALLLALPATXGAQMG

SEQ ID NO: 323 - protein, 16 aa, Artificial Sequence
  source: /note="Description of Artificial Sequence: Synthetic peptide"
  MOD_RES (7)..(7): Citrulline
LALPATXGAQMGLAPM

SEQ ID NO: 324 - protein, 16 aa, Artificial Sequence
  source: /note="Description of Artificial Sequence: Synthetic peptide"
  MOD_RES (4)..(4): Citrulline
  MOD_RES (7)..(7): Citrulline
SWVXLKXGIYKDDIAQ

SEQ ID NO: 325 - protein, 16 aa, Artificial Sequence
  source: /note="Description of Artificial Sequence: Synthetic peptide"
  MOD_RES (3)..(3): Citrulline
LKXGIYKDDIAQVDYV

SEQ ID NO: 326 - protein, 16 aa, Artificial Sequence
  source: /note="Description of Artificial Sequence: Synthetic peptide"
  MOD_RES (5)..(5): Citrulline
  MOD_RES (8)..(8): Citrulline
SLLSXYQXGDKQGLLL

SEQ ID NO: 327 - protein, 16 aa, Artificial Sequence
  source: /note="Description of Artificial Sequence: Synthetic peptide"
  MOD_RES (8)..(8): Citrulline
  MOD_RES (10)..(10): Citrulline
QDTYKPHXNXGSPGGY

SEQ ID NO: 328 - protein, 16 aa, Artificial Sequence
  source: /note="Description of Artificial Sequence: Synthetic peptide"
  MOD_RES (4)..(4): Citrulline
  MOD_RES (6)..(6): Citrulline
KPHXNXGSPGGYSHDS

SEQ ID NO: 329 - protein, 16 aa, Artificial Sequence
  source: /note="Description of Artificial Sequence: Synthetic peptide"
  MOD_RES (8)..(8): Citrulline
  MOD_RES (11)..(11): Citrulline
IMLLTDWXFTXGVEEQ

SEQ ID NO: 330 - protein, 16 aa, Artificial Sequence
  source: /note="Description of Artificial Sequence: Synthetic peptide"
  MOD_RES (4)..(4): Citrulline
  MOD_RES (7)..(7): Citrulline
TDWXFTXGVEEQTKAF

SEQ ID NO: 331 - protein, 16 aa, Artificial Sequence
  source: /note="Description of Artificial Sequence: Synthetic peptide"
  MOD_RES (3)..(3): Citrulline
FTXGVEEQTKAFLDGF

SEQ ID NO: 332 - protein, 16 aa, Artificial Sequence
  source: /note="Description of Artificial Sequence: Synthetic peptide"
  MOD_RES (7)..(7): Citrulline
  MOD_RES (10)..(10): Citrulline
AQIMTIXGSXETIQAA

SEQ ID NO: 333 - protein, 16 aa, Artificial Sequence
  source: /note="Description of Artificial Sequence: Synthetic peptide"
  MOD_RES (8)..(8): Citrulline
  MOD_RES (10)..(10): Citrulline
EEIMEIHXIXGSSPSS

SEQ ID NO: 334 - protein, 16 aa, Artificial Sequence
  source: /note="Description of Artificial Sequence: Synthetic peptide"
  MOD_RES (4)..(4): Citrulline
  MOD_RES (6)..(6): Citrulline
EIHXIXGSSPSSCGSS

SEQ ID NO: 335 - protein, 16 aa, Artificial Sequence
  source: /note="Description of Artificial Sequence: Synthetic peptide"
  MOD_RES (2)..(2): Citrulline
IXGSSPSSCGSSPLNI

SEQ ID NO: 336 - protein, 16 aa, Artificial Sequence
  source: /note="Description of Artificial Sequence: Synthetic peptide"
  MOD_RES (11)..(11): Citrulline
PLTLLQADTVXGAVLG

SEQ ID NO: 337 - protein, 16 aa, Artificial Sequence
  source: /note="Description of Artificial Sequence: Synthetic peptide"
  MOD_RES (7)..(7): Citrulline
  MOD_RES (14)..(14): Citrulline
LQADTVXGAVLGSXSA

SEQ ID NO: 338 - protein, 16 aa, Artificial Sequence
  source: /note="Description of Artificial Sequence: Synthetic peptide"
  MOD_RES (9)..(9): Citrulline
KVSHKFTIXGLPSNNS

SEQ ID NO: 339 - protein, 16 aa, Artificial Sequence
  source: /note="Description of Artificial Sequence: Synthetic peptide"
  MOD_RES (5)..(5): Citrulline
KFTIXGLPSNNSLDFL

SEQ ID NO: 340 - protein, 16 aa, Artificial Sequence
  source: /note="Description of Artificial Sequence: Synthetic peptide"
  MOD_RES (12)..(12): Citrulline
  MOD_RES (14)..(14): Citrulline
SAEEGYVKMFLXGXPV

SEQ ID NO: 341 - protein, 16 aa, Artificial Sequence
  source: /note="Description of Artificial Sequence: Synthetic peptide"
  MOD_RES (8)..(8): Citrulline
  MOD_RES (10)..(10): Citrulline
GYVKMFLXGXPVTMYM

SEQ ID NO: 342 - protein, 16 aa, Artificial Sequence
  source: /note="Description of Artificial Sequence: Synthetic peptide"
  MOD_RES (10)..(10): Citrulline
VQEPTTGNWXGMLKTS

SEQ ID NO: 343 - protein, 16 aa, Artificial Sequence
  source: /note="Description of Artificial Sequence: Synthetic peptide"
  MOD_RES (6)..(6): Citrulline
TTGNWXGMLKTSKAEE

SEQ ID NO: 344 - protein, 16 aa, Artificial Sequence
  source: /note="Description of Artificial Sequence: Synthetic peptide"
  MOD_RES (6)..(6): Citrulline
  MOD_RES (11)..(11): Citrulline
AQLYFXPTIQXGQWPP

SEQ ID NO: 345 - protein, 16 aa, Artificial Sequence
  source: /note="Description of Artificial Sequence: Synthetic peptide"
  MOD_RES (2)..(2): Citrulline
  MOD_RES (7)..(7): Citrulline
FXPTIQXGQWPPGLPG

SEQ ID NO: 346 - protein, 16 aa, Artificial Sequence
  source: /note="Description of Artificial Sequence: Synthetic peptide"
  MOD_RES (8)..(8): Citrulline
  MOD_RES (12)..(12): Citrulline
FGGEDTSXSSTXGSLN

SEQ ID NO: 347 - protein, 16 aa, Artificial Sequence
  source: /note="Description of Artificial Sequence: Synthetic peptide"
  MOD_RES (4)..(4): Citrulline
  MOD_RES (8)..(8): Citrulline
DTSXSSTXGSLNPENP

SEQ ID NO: 348 - protein, 16 aa, Artificial Sequence
  source: /note="Description of Artificial Sequence: Synthetic peptide"
  MOD_RES (4)..(4): Citrulline
SSTXGSLNPENPVQVS

SEQ ID NO: 349 - protein, 16 aa, Artificial Sequence
  source: /note="Description of Artificial Sequence: Synthetic peptide"
  MOD_RES (4)..(4): Citrulline
  MOD_RES (9)..(9): Citrulline
VMGXSGAAXGLLLQKV

SEQ ID NO: 350 - protein, 16 aa, Artificial Sequence
  source: /note="Description of Artificial Sequence: Synthetic peptide"
  MOD_RES (5)..(5): Citrulline
  MOD_RES (13)..(13): Citrulline
SGAAXGLLLQKVXSGQ

SEQ ID NO: 351 - protein, 16 aa, Artificial Sequence
  source: /note="Description of Artificial Sequence: Synthetic peptide"
  MOD_RES (7)..(7): Citrulline
  MOD_RES (14)..(14): Citrulline
QEELKWXKIQYMAXGE

SEQ ID NO: 352 - protein, 16 aa, Artificial Sequence
  source: /note="Description of Artificial Sequence: Synthetic peptide"
  MOD_RES (3)..(3): Citrulline
  MOD_RES (10)..(10): Citrulline
KWXKIQYMAXGEKSLA

SEQ ID NO: 353 - protein, 16 aa, Artificial Sequence
  source: /note="Description of Artificial Sequence: Synthetic peptide"
  MOD_RES (6)..(6): Citrulline
IQYMAXGEKSLAYHEW

SEQ ID NO: 354 - protein, 16 aa, Artificial Sequence
  source: /note="Description of Artificial Sequence: Synthetic peptide"
  MOD_RES (2)..(2): Citrulline
AXGEKSLAYHEWKMAL

SEQ ID NO: 355 - protein, 16 aa, Artificial Sequence
  source: /note="Description of Artificial Sequence: Synthetic peptide"
  MOD_RES (9)..(10): Citrulline
LPNTDMETXXGAYLNA

SEQ ID NO: 356 - protein, 16 aa, Artificial Sequence
  source: /note="Description of Artificial Sequence: Synthetic peptide"
  MOD_RES (5)..(6): Citrulline
DMETXXGAYLNALKIA

SEQ ID NO: 357 - protein, 16 aa, Artificial Sequence
  source: /note="Description of Artificial Sequence: Synthetic peptide"
  MOD_RES (8)..(8): Citrulline
  MOD_RES (12)..(12): Citrulline
MVHQHGPXGVVXGPPP

SEQ ID NO: 358 - protein, 16 aa, Artificial Sequence
  source: /note="Description of Artificial Sequence: Synthetic peptide"
  MOD_RES (4)..(4): Citrulline
  MOD_RES (8)..(8): Citrulline
HGPXGVVXGPPPPYQM

SEQ ID NO: 359 - protein, 16 aa, Artificial Sequence
  source: /note="Description of Artificial Sequence: Synthetic peptide"
  MOD_RES (9)..(9): Citrulline
  MOD_RES (12)..(12): Citrulline
QGIFSGPGXGEXFPNP

SEQ ID NO: 360 - protein, 16 aa, Artificial Sequence
  source: /note="Description of Artificial Sequence: Synthetic peptide"
  MOD_RES (5)..(5): Citrulline
  MOD_RES (8)..(8): Citrulline
SGPGXGEXFPNPQGLS

SEQ ID NO: 361 - protein, 16 aa, Artificial Sequence
  source: /note="Description of Artificial Sequence: Synthetic peptide"
  MOD_RES (9)..(9): Citrulline
  MOD_RES (11)..(11): Citrulline
SPATTKEQXGXALPGK

SEQ ID NO: 362 - protein, 16 aa, Artificial Sequence
  source: /note="Description of Artificial Sequence: Synthetic peptide"
  MOD_RES (5)..(5): Citrulline
  MOD_RES (7)..(7): Citrulline
TKEQXGXALPGKNLPS

SEQ ID NO: 363 - protein, 16 aa, Artificial Sequence
  source: /note="Description of Artificial Sequence: Synthetic peptide"
  MOD_RES (4)..(4): Citrulline
  MOD_RES (12)..(12): Citrulline
HSDXPPSASQPXGELM

SEQ ID NO: 364 - protein, 16 aa, Artificial Sequence
  source: /note="Description of Artificial Sequence: Synthetic peptide"
  MOD_RES (8)..(8): Citrulline
PPSASQPXGELMCYKA

SEQ ID NO: 365 - protein, 16 aa, Artificial Sequence
  source: /note="Description of Artificial Sequence: Synthetic peptide"
  MOD_RES (11)..(11): Citrulline
AGVVVGSGGGXGAGGS

SEQ ID NO: 366 - protein, 16 aa, Artificial Sequence
  source: /note="Description of Artificial Sequence: Synthetic peptide"
  MOD_RES (7)..(7): Citrulline
  MOD_RES (13)..(13): Citrulline
VGSGGGXGAGGSXQGG

SEQ ID NO: 367 - protein, 16 aa, Artificial Sequence
  source: /note="Description of Artificial Sequence: Synthetic peptide"
  MOD_RES (3)..(3): Citrulline
  MOD_RES (9)..(9): Citrulline
GGXGAGGSXQGGQPGA

SEQ ID NO: 368 - protein, 16 aa, Artificial Sequence
  source: /note="Description of Artificial Sequence: Synthetic peptide"
  MOD_RES (2)..(2): Citrulline
  MOD_RES (12)..(12): Citrulline
SXSGGGGHGSSXGFGG

SEQ ID NO: 369 - protein, 16 aa, Artificial Sequence
  source: /note="Description of Artificial Sequence: Synthetic peptide"
  MOD_RES (11)..(11): Citrulline
EVYSVDWSQTXGEQLV

SEQ ID NO: 370 - protein, 16 aa, Artificial Sequence
  source: /note="Description of Artificial Sequence: Synthetic peptide"
  MOD_RES (7)..(7): Citrulline
VDWSQTXGEQLVVSGS

SEQ ID NO: 371 - protein, 16 aa, Artificial Sequence
  source: /note="Description of Artificial Sequence: Synthetic peptide"
  MOD_RES (3)..(3): Citrulline
QTXGEQLVVSGSWDQT

SEQ ID NO: 372 - protein, 16 aa, Artificial Sequence
  source: /note="Description of Artificial Sequence: Synthetic peptide"
  MOD_RES (13)..(13): Citrulline
QPQDCDSHCKPAXGSY

SEQ ID NO: 373 - protein, 16 aa, Artificial Sequence
  source: /note="Description of Artificial Sequence: Synthetic peptide"
  MOD_RES (9)..(9): Citrulline
  MOD_RES (13)..(13): Citrulline
CDSHCKPAXGSYXISL

SEQ ID NO: 374 - protein, 16 aa, Artificial Sequence
  source: /note="Description of Artificial Sequence: Synthetic peptide"
  MOD_RES (6)..(6): Citrulline
  MOD_RES (14)..(14): Citrulline
GGAGGXGPGLIAAXGS

SEQ ID NO: 375 - protein, 16 aa, Artificial Sequence
  source: /note="Description of Artificial Sequence: Synthetic peptide"
  MOD_RES (2)..(2): Citrulline
  MOD_RES (10)..(10): Citrulline
GXGPGLIAAXGSLVLP

SEQ ID NO: 376 - protein, 16 aa, Artificial Sequence
  source: /note="Description of Artificial Sequence: Synthetic peptide"
  MOD_RES (6)..(6): Citrulline
  MOD_RES (14)..(14): Citrulline
GLIAAXGSLVLPWXDA

SEQ ID NO: 377 - protein, 16 aa, Artificial Sequence
  source: /note="Description of Artificial Sequence: Synthetic peptide"
  MOD_RES (13)..(13): Citrulline
ISFETPSNPPLAXGHV

SEQ ID NO: 378 - protein, 16 aa, Artificial Sequence
  source: /note="Description of Artificial Sequence: Synthetic peptide"
  MOD_RES (9)..(9): Citrulline
  MOD_RES (16)..(16): Citrulline
TPSNPPLAXGHVIAAX

SEQ ID NO: 379 - protein, 16 aa, Artificial Sequence
  source: /note="Description of Artificial Sequence: Synthetic peptide"
  MOD_RES (8)..(8): Citrulline
DFLHSLEXGQVLPADS

SEQ ID NO: 380 - protein, 16 aa, Artificial Sequence
  source: /note="Description of Artificial Sequence: Synthetic peptide"
  MOD_RES (4)..(4): Citrulline
SLEXGQVLPADSLLNL

SEQ ID NO: 381 - protein, 16 aa, Artificial Sequence
  source: /note="Description of Artificial Sequence: Synthetic peptide"
  MOD_RES (9)..(9): Citrulline
AYMDGQGQXGDIISQS

SEQ ID NO: 382 - protein, 16 aa, Artificial Sequence
  source: /note="Description of Artificial Sequence: Synthetic peptide"
  MOD_RES (5)..(5): Citrulline
GQGQXGDIISQSGLSN

SEQ ID NO: 383 - protein, 16 aa, Artificial Sequence
  source: /note="Description of Artificial Sequence: Synthetic peptide"
  MOD_RES (8)..(8): Citrulline
LVAGPTTXGAAVSAEA

SEQ ID NO: 384 - protein, 16 aa, Artificial Sequence
  source: /note="Description of Artificial Sequence: Synthetic peptide"
  MOD_RES (4)..(4): Citrulline
PTTXGAAVSAEAMEPE

SEQ ID NO: 385 - protein, 16 aa, Artificial Sequence
  source: /note="Description of Artificial Sequence: Synthetic peptide"
  MOD_RES (2)..(2): Citrulline
  MOD_RES (8)..(8): Citrulline
SXHTPFQXGVFCNDES

SEQ ID NO: 386 - protein, 16 aa, Artificial Sequence
  source: /note="Description of Artificial Sequence: Synthetic peptide"
  MOD_RES (4)..(4): Citrulline
PFQXGVFCNDESIKYP

SEQ ID NO: 387 - protein, 16 aa, Artificial Sequence
  source: /note="Description of Artificial Sequence: Synthetic peptide"
  MOD_RES (6)..(6): Citrulline
  MOD_RES (9)..(9): Citrulline
LVPLGXLSXGEQQQQQ

SEQ ID NO: 388 - protein, 15 aa, Artificial Sequence
  source: /note="Description of Artificial Sequence: Synthetic peptide"
  MOD_RES (2)..(2): Citrulline
  MOD_RES (5)..(5): Citrulline
GXLSXGEQQQQQQQQ

SEQ ID NO: 389 - protein, 16 aa, Artificial Sequence
  source: /note="Description of Artificial Sequence: Synthetic peptide"
  MOD_RES (6)..(6): Citrulline
  MOD_RES (12)..(12): Citrulline
LKGTFXQNNFAXGLDQ

SEQ ID NO: 390 - protein, 16 aa, Artificial Sequence
  source: /note="Description of Artificial Sequence: Synthetic peptide"
  MOD_RES (2)..(2): Citrulline
  MOD_RES (8)..(8): Citrulline
FXQNNFAXGLDQQLPD

SEQ ID NO: 391 - protein, 16 aa, Artificial Sequence
  source: /note="Description of Artificial Sequence: Synthetic peptide"
  MOD_RES (11)..(11): Citrulline
KADGVPVYLKXGLPDQ

SEQ ID NO: 392 - protein, 16 aa, Artificial Sequence
  source: /note="Description of Artificial Sequence: Synthetic peptide"
  MOD_RES (7)..(7): Citrulline
  MOD_RES (16)..(16): Citrulline
VPVYLKXGLPDQMLYX

SEQ ID NO: 393 - protein, 16 aa, Artificial Sequence
  source: /note="Description of Artificial Sequence: Synthetic peptide"
  MOD_RES (7)..(7): Citrulline
EDSGAAXGSLQPAPAQ

SEQ ID NO: 394 - protein, 16 aa, Artificial Sequence
  source: /note="Description of Artificial Sequence: Synthetic peptide"
  MOD_RES (3)..(3): Citrulline
AAXGSLQPAPAQPPGD

SEQ ID NO: 395 - protein, 16 aa, Artificial Sequence
  source: /note="Description of Artificial Sequence: Synthetic peptide"
  MOD_RES (12)..(12): Citrulline
NHVKCVEALLAXGADL

SEQ ID NO: 396 - protein, 16 aa, Artificial Sequence
  source: /note="Description of Artificial Sequence: Synthetic peptide"
  MOD_RES (8)..(8): Citrulline
CVEALLAXGADLTTEA

SEQ ID NO: 397 - protein, 16 aa, Artificial Sequence
  source: /note="Description of Artificial Sequence: Synthetic peptide"
  MOD_RES (4)..(4): Citrulline
LLAXGADLTTEADSGY

SEQ ID NO: 398 - protein, 16 aa, Artificial Sequence
  source: /note="Description of Artificial Sequence: Synthetic peptide"
  MOD_RES (10)..(10): Citrulline
SYVKMTCDIXGSLQED

SEQ ID NO: 399 - protein, 16 aa, Artificial Sequence
  source: /note="Description of Artificial Sequence: Synthetic peptide"
  MOD_RES (6)..(6): Citrulline
MTCDIXGSLQEDSQVT

SEQ ID NO: 400 - protein, 16 aa, Artificial Sequence
  source: /note="Description of Artificial Sequence: Synthetic peptide"
  MOD_RES (9)..(9): Citrulline
SDGGPPPSXGSTGGAP

SEQ ID NO: 401 - protein, 16 aa, Artificial Sequence
  source: /note="Description of Artificial Sequence: Synthetic peptide"
  MOD_RES (11)..(11): Citrulline
PMNNWGSGNGXGSGGG

SEQ ID NO: 402 - protein, 16 aa, Artificial Sequence
  source: /note="Description of Artificial Sequence: Synthetic peptide"
  MOD_RES (7)..(7): Citrulline
WGSGNGXGSGGGQGSN

SEQ ID NO: 403 - protein, 16 aa, Artificial Sequence
  source: /note="Description of Artificial Sequence: Synthetic peptide"
  MOD_RES (3)..(3): Citrulline
NGXGSGGGQGSNGQGS

SEQ ID NO: 404 - protein, 16 aa, Artificial Sequence
  source: /note="Description of Artificial Sequence: Synthetic peptide"
  MOD_RES (15)..(15): Citrulline
NSEYVPMLPGKFLGXG

SEQ ID NO: 405 - protein, 16 aa, Artificial Sequence
  source: /note="Description of Artificial Sequence: Synthetic peptide"
  MOD_RES (11)..(11): Citrulline
VPMLPGKFLGXGLDKE

SEQ ID NO: 406 - protein, 16 aa, Artificial Sequence
  source: /note="Description of Artificial Sequence: Synthetic peptide"
  MOD_RES (7)..(7): Citrulline
PGKFLGXGLDKEVSYN

SEQ ID NO: 407 - protein, 16 aa, Artificial Sequence
  source: /note="Description of Artificial Sequence: Synthetic peptide"
  MOD_RES (10)..(10): Citrulline
VLGGLWTSTXGSVQML

SEQ ID NO: 408 - protein, 16 aa, Artificial Sequence
  source: /note="Description of Artificial Sequence: Synthetic peptide"
  MOD_RES (6)..(6): Citrulline
LWTSTXGSVQMLTDFG

SEQ ID NO: 409 - protein, 16 aa, Artificial Sequence
  source: /note="Description of Artificial Sequence: Synthetic peptide"
  MOD_RES (2)..(2): Citrulline
TXGSVQMLTDFGPHGV

SEQ ID NO: 410 - protein, 16 aa, Artificial Sequence
  source: /note="Description of Artificial Sequence: Synthetic peptide"
  MOD_RES (6)..(6): Citrulline
FEQLSXGQTPFAGTQD

SEQ ID NO: 411 - protein, 16 aa, Artificial Sequence
  source: /note="Description of Artificial Sequence: Synthetic peptide"
  MOD_RES (2)..(2): Citrulline
SXGQTPFAGTQDKSSL

SEQ ID NO: 412 - protein, 16 aa, Artificial Sequence
  source: /note="Description of Artificial Sequence: Synthetic peptide"
  MOD_RES (8)..(8): Citrulline
VNGQSQLXGAFGSGAL

SEQ ID NO: 413 - protein, 16 aa, Artificial Sequence
  source: /note="Description of Artificial Sequence: Synthetic peptide"
  MOD_RES (4)..(4): Citrulline
SQLXGAFGSGALPTGP

SEQ ID NO: 414 - protein, 16 aa, Artificial Sequence
  source: /note="Description of Artificial Sequence: Synthetic peptide"
  MOD_RES (6)..(6): Citrulline
  MOD_RES (8)..(8): Citrulline
QMFWVXAXGYIGEGDM

SEQ ID NO: 415 - protein, 16 aa, Artificial Sequence
  source: /note="Description of Artificial Sequence: Synthetic peptide"
  MOD_RES (2)..(2): Citrulline
  MOD_RES (4)..(4): Citrulline
VXAXGYIGEGDMKMHC

SEQ ID NO: 416 - protein, 16 aa, Artificial Sequence
  source: /note="Description of Artificial Sequence: Synthetic peptide"
  MOD_RES (7)..(7): Citrulline
  MOD_RES (9)..(9): Citrulline
MCHHAVXIXGKSYVQC

SEQ ID NO: 417 - protein, 16 aa, Artificial Sequence
  source: /note="Description of Artificial Sequence: Synthetic peptide"
  MOD_RES (3)..(3): Citrulline
  MOD_RES (5)..(5): Citrulline
AVXIXGKSYVQCQGIP

SEQ ID NO: 418 - protein, 16 aa, Artificial Sequence
  source: /note="Description of Artificial Sequence: Synthetic peptide"
  MOD_RES (8)..(8): Citrulline
  MOD_RES (11)..(11): Citrulline
LLCAQQLXGTXAMNDI

SEQ ID NO: 419 - protein, 16 aa, Artificial Sequence
  source: /note="Description of Artificial Sequence: Synthetic peptide"
  MOD_RES (7)..(7): Citrulline
KEDSKTXGEKIKSDFF

SEQ ID NO: 420 - protein, 16 aa, Artificial Sequence
  source: /note="Description of Artificial Sequence: Synthetic peptide"
  MOD_RES (3)..(3): Citrulline
KTXGEKIKSDFFELLS

SEQ ID NO: 421 - protein, 16 aa, Artificial Sequence
  source: /note="Description of Artificial Sequence: Synthetic peptide"
  MOD_RES (7)..(7): Citrulline
SILEMSXGVKLTDVAP

SEQ ID NO: 422 - protein, 16 aa, Artificial Sequence
  source: /note="Description of Artificial Sequence: Synthetic peptide"
  MOD_RES (5)..(5): Citrulline
  MOD_RES (10)..(10): Citrulline
LEFLXGALEXDKKDGF

SEQ ID NO: 423 - protein, 16 aa, Artificial Sequence
  source: /note="Description of Artificial Sequence: Synthetic peptide"
  MOD_RES (5)..(5): Citrulline
  MOD_RES (11)..(11): Citrulline
FEQMXQECLQXGTLFE

SEQ ID NO: 424 - protein, 16 aa, Artificial Sequence
  source: /note="Description of Artificial Sequence: Synthetic peptide"
  MOD_RES (1)..(1): Citrulline
  MOD_RES (7)..(7): Citrulline
XQECLQXGTLFEDADF

SEQ ID NO: 425 - protein, 16 aa, Artificial Sequence
  source: /note="Description of Artificial Sequence: Synthetic peptide"
  MOD_RES (3)..(3): Citrulline
LQXGTLFEDADFPASN

SEQ ID NO: 426 - protein, 16 aa, Artificial Sequence
  source: /note="Description of Artificial Sequence: Synthetic peptide"
  MOD_RES (10)..(10): Citrulline
YEILEKALKXGSLLGC

SEQ ID NO: 427 - protein, 16 aa, Artificial Sequence
  source: /note="Description of Artificial Sequence: Synthetic peptide"
  MOD_RES (6)..(6): Citrulline
EKALKXGSLLGCFIDT

SEQ ID NO: 428 - protein, 16 aa, Artificial Sequence
  source: /note="Description of Artificial Sequence: Synthetic peptide"
  MOD_RES (11)..(11): Citrulline
YHAWKANAIGXGAKSV

SEQ ID NO: 429 - protein, 16 aa, Artificial Sequence
  source: /note="Description of Artificial Sequence: Synthetic peptide"
  MOD_RES (7)..(7): Citrulline
  MOD_RES (13)..(13): Citrulline
KANAIGXGAKSVXEFL

SEQ ID NO: 430 - protein, 16 aa, Artificial Sequence
  source: /note="Description of Artificial Sequence: Synthetic peptide"
  MOD_RES (2)..(2): Citrulline
  MOD_RES (14)..(14): Citrulline
IXQGSLIQVPSVEXGK

SEQ ID NO: 431 - protein, 16 aa, Artificial Sequence
  source: /note="Description of Artificial Sequence: Synthetic peptide"
  MOD_RES (10)..(10): Citrulline
SLIQVPSVEXGKLSKV

SEQ ID NO: 432 - protein, 16 aa, Artificial Sequence
  source: /note="Description of Artificial Sequence: Synthetic peptide"
  MOD_RES (6)..(6): Citrulline
  MOD_RES (13)..(13): Citrulline
VPSVEXGKLSKVXLGS

SEQ ID NO: 433 - protein, 16 aa, Artificial Sequence
  source: /note="Description of Artificial Sequence: Synthetic peptide"
  MOD_RES (1)..(1): Citrulline
  MOD_RES (11)..(11): Citrulline
XDLLHIGTQAXGDLFD

SEQ ID NO: 434 - protein, 16 aa, Artificial Sequence
  source: /note="Description of Artificial Sequence: Synthetic peptide"
  MOD_RES (7)..(7): Citrulline
HIGTQAXGDLFDLAVP

SEQ ID NO: 435 - protein, 16 aa, Artificial Sequence
  source: /note="Description of Artificial Sequence: Synthetic peptide"
  MOD_RES (3)..(3): Citrulline
QAXGDLFDLAVPMPEV

SEQ ID NO: 436 - protein, 16 aa, Artificial Sequence
  source: /note="Description of Artificial Sequence: Synthetic peptide"
  MOD_RES (3)..(3): Citrulline
  MOD_RES (6)..(6): Citrulline
TSXQAXGLPLEVSSED

SEQ ID NO: 437 - protein, 16 aa, Artificial Sequence
  source: /note="Description of Artificial Sequence: Synthetic peptide"
  MOD_RES (2)..(2): Citrulline
AXGLPLEVSSEDHMDD

SEQ ID NO: 438 - protein, 16 aa, Artificial Sequence
  source: /note="Description of Artificial Sequence: Synthetic peptide"
  MOD_RES (6)..(6): Citrulline
  MOD_RES (11)..(11): Citrulline
CLAPVXVVIPXGSILD

SEQ ID NO: 439 - protein, 16 aa, Artificial Sequence
  source: /note="Description of Artificial Sequence: Synthetic peptide"
  MOD_RES (2)..(2): Citrulline
  MOD_RES (7)..(7): Citrulline
VXVVIPXGSILDPSPE

SEQ ID NO: 440 - protein, 16 aa, Artificial Sequence
  source: /note="Description of Artificial Sequence: Synthetic peptide"
  MOD_RES (3)..(3): Citrulline
IPXGSILDPSPEAAVV

SEQ ID NO: 441 - protein, 16 aa, Artificial Sequence
  source: /note="Description of Artificial Sequence: Synthetic peptide"
  MOD_RES (5)..(5): Citrulline
  MOD_RES (14)..(14): Citrulline
PPCAXGNSEPGYAXGQ

SEQ ID NO: 442 - protein, 16 aa, Artificial Sequence
  source: /note="Description of Artificial Sequence: Synthetic peptide"
  MOD_RES (1)..(1): Citrulline
  MOD_RES (10)..(10): Citrulline
XGNSEPGYAXGQESQQ

SEQ ID NO: 443 - protein, 16 aa, Artificial Sequence
  source: /note="Description of Artificial Sequence: Synthetic peptide"
  MOD_RES (6)..(6): Citrulline
EPGYAXGQESQQMSTA

SEQ ID NO: 444 - protein, 16 aa, Artificial Sequence
  source: /note="Description of Artificial Sequence: Synthetic peptide"
  MOD_RES (12)..(12): Citrulline
  MOD_RES (14)..(14): Citrulline
AYGYYTGEPSKXSXGA

SEQ ID NO: 445 - protein, 16 aa, Artificial Sequence
  source: /note="Description of Artificial Sequence: Synthetic peptide"
  MOD_RES (8)..(8): Citrulline
  MOD_RES (10)..(10): Citrulline
YTGEPSKXSXGALGSI

SEQ ID NO: 446 - protein, 16 aa, Artificial Sequence
  source: /note="Description of Artificial Sequence: Synthetic peptide"
  MOD_RES (13)..(13): Citrulline
LPMTDLDIKFQYXGKE

SEQ ID NO: 447 - protein, 16 aa, Artificial Sequence
  source: /note="Description of Artificial Sequence: Synthetic peptide"
  MOD_RES (9)..(9): Citrulline
DLDIKFQYXGKEYGQT

SEQ ID NO: 448 - protein, 16 aa, Artificial Sequence
  source: /note="Description of Artificial Sequence: Synthetic peptide"
  MOD_RES (5)..(5): Citrulline
KFQYXGKEYGQTMTVS

SEQ ID NO: 449 - protein, 16 aa, Artificial Sequence
  source: /note="Description of Artificial Sequence: Synthetic peptide"
  MOD_RES (9)..(9): Citrulline
  MOD_RES (15)..(15): Citrulline
IIPGGVAEXHGGLKXG

SEQ ID NO: 450 - protein, 16 aa, Artificial Sequence
  source: /note="Description of Artificial Sequence: Synthetic peptide"
  MOD_RES (5)..(5): Citrulline
  MOD_RES (11)..(11): Citrulline
GVAEXHGGLKXGDQLL

SEQ ID NO: 451 - protein, 16 aa, Artificial Sequence
  source: /note="Description of Artificial Sequence: Synthetic peptide"
  MOD_RES (1)..(1): Citrulline
  MOD_RES (7)..(7): Citrulline
XHGGLKXGDQLLSVNG

SEQ ID NO: 452 - protein, 16 aa, Artificial Sequence
  source: /note="Description of Artificial Sequence: Synthetic peptide"
  MOD_RES (3)..(3): Citrulline
LKXGDQLLSVNGVSVE

SEQ ID NO: 453 - protein, 16 aa, Artificial Sequence
  source: /note="Description of Artificial Sequence: Synthetic peptide"
  MOD_RES (4)..(4): Citrulline
  MOD_RES (12)..(12): Citrulline
ASLXSSVPPSKXGTVG

SEQ ID NO: 454 - protein, 16 aa, Artificial Sequence
  source: /note="Description of Artificial Sequence: Synthetic peptide"
  MOD_RES (8)..(8): Citrulline
SSVPPSKXGTVGAGCG

SEQ ID NO: 455 - protein, 16 aa, Artificial Sequence
  source: /note="Description of Artificial Sequence: Synthetic peptide"
  MOD_RES (11)..(11): Citrulline
  MOD_RES (15)..(15): Citrulline
GMLYKCTGGLXGIAXG

SEQ ID NO: 456 - protein, 16 aa, Artificial Sequence
  source: /note="Description of Artificial Sequence: Synthetic peptide"
  MOD_RES (7)..(7): Citrulline
  MOD_RES (11)..(11): Citrulline
KCTGGLXGIAXGGLTG

SEQ ID NO: 457 - protein, 16 aa, Artificial Sequence
  source: /note="Description of Artificial Sequence: Synthetic peptide"
  MOD_RES (3)..(3): Citrulline
  MOD_RES (7)..(7): Citrulline
GLXGIAXGGLTGLTLT

SEQ ID NO: 458 - protein, 16 aa, Artificial Sequence
  source: /note="Description of Artificial Sequence: Synthetic peptide"
  MOD_RES (6)..(6): Citrulline
LKLLHXGADINYANVD

SEQ ID NO: 459 - protein, 16 aa, Artificial Sequence
  source: /note="Description of Artificial Sequence: Synthetic peptide"
  MOD_RES (2)..(2): Citrulline
HXGADINYANVDGLTA

SEQ ID NO: 460 - protein, 16 aa, Artificial Sequence
  source: /note="Description of Artificial Sequence: Synthetic peptide"
  MOD_RES (12)..(12): Citrulline
NSLVGITSAYSXGITK

SEQ ID NO: 461 - protein, 16 aa, Artificial Sequence
  source: /note="Description of Artificial Sequence: Synthetic peptide"
  MOD_RES (8)..(8): Citrulline
  MOD_RES (16)..(16): Citrulline
GITSAYSXGITKENEX

SEQ ID NO: 462 - protein, 16 aa, Artificial Sequence
  source: /note="Description of Artificial Sequence: Synthetic peptide"
  MOD_RES (9)..(9): Citrulline
GYGSATLSXGPPPPVG

SEQ ID NO: 463 - protein, 16 aa, Artificial Sequence
  source: /note="Description of Artificial Sequence: Synthetic peptide"
  MOD_RES (12)..(12): Citrulline
SGQQSTYGKASXGGGN

SEQ ID NO: 464 - protein, 16 aa, Artificial Sequence
  source: /note="Description of Artificial Sequence: Synthetic peptide"
  MOD_RES (8)..(8): Citrulline
STYGKASXGGGNHQNN

SEQ ID NO: 465 - protein, 16 aa, Artificial Sequence
  source: /note="Description of Artificial Sequence: Synthetic peptide"
  MOD_RES (5)..(5): Citrulline
  MOD_RES (9)..(9): Citrulline
VNVYXLITXGTLEEKI

SEQ ID NO: 466 - protein, 16 aa, Artificial Sequence
  source: /note="Description of Artificial Sequence: Synthetic peptide"
  MOD_RES (1)..(1): Citrulline
  MOD_RES (5)..(5): Citrulline
XLITXGTLEEKIMGLQ

SEQ ID NO: 467 - protein, 16 aa, Artificial Sequence
  source: /note="Description of Artificial Sequence: Synthetic peptide"
  MOD_RES (13)..(13): Citrulline
VTSSVVPEAKASXGGL

SEQ ID NO: 468 - protein, 16 aa, Artificial Sequence
  source: /note="Description of Artificial Sequence: Synthetic peptide"
  MOD_RES (9)..(9): Citrulline
VVPEAKASXGGLPSLA

SEQ ID NO: 469 - protein, 16 aa, Artificial Sequence
  source: /note="Description of Artificial Sequence: Synthetic peptide"
  MOD_RES (7)..(7): Citrulline
QEGTMNXGDFLLSVNG

SEQ ID NO: 470 - protein, 16 aa, Artificial Sequence
  source: /note="Description of Artificial Sequence: Synthetic peptide"
  MOD_RES (3)..(3): Citrulline
MNXGDFLLSVNGASLA

SEQ ID NO: 471 - protein, 16 aa, Artificial Sequence
  source: /note="Description of Artificial Sequence: Synthetic peptide"
  MOD_RES (9)..(9): Citrulline
DLLELLDTXGQVLAAA

SEQ ID NO: 472 - protein, 16 aa, Artificial Sequence
  source: /note="Description of Artificial Sequence: Synthetic peptide"
  MOD_RES (5)..(5): Citrulline
LLDTXGQVLAAAYELQ

SEQ ID NO: 473 - protein, 16 aa, Artificial Sequence
  source: /note="Description of Artificial Sequence: Synthetic peptide"
  MOD_RES (7)..(7): Citrulline
  MOD_RES (11)..(11): Citrulline
VVPSTTXGMTXAMTMP

SEQ ID NO: 474 - protein, 16 aa, Artificial Sequence
  source: /note="Description of Artificial Sequence: Synthetic peptide"
  MOD_RES (13)..(13): Citrulline
PPLPGGAVPPAPXGSS

SEQ ID NO: 475 - protein, 16 aa, Artificial Sequence
  source: /note="Description of Artificial Sequence: Synthetic peptide"
  MOD_RES (9)..(9): Citrulline
GGAVPPAPXGSSASQE

SEQ ID NO: 476 - protein, 16 aa, Artificial Sequence
  source: /note="Description of Artificial Sequence: Synthetic peptide"
  MOD_RES (4)..(4): Citrulline
  MOD_RES (11)..(11): Citrulline
DGLXGTAVLQXGGLNL

SEQ ID NO: 477 - protein, 16 aa, Artificial Sequence
  source: /note="Description of Artificial Sequence: Synthetic peptide"
  MOD_RES (7)..(7): Citrulline
GTAVLQXGGLNLTAVT

SEQ ID NO: 478 - protein, 16 aa, Artificial Sequence
  source: /note="Description of Artificial Sequence: Synthetic peptide"
  MOD_RES (12)..(12): Citrulline
QLQCVTGPQATXGQML

SEQ ID NO: 479 - protein, 16 aa, Artificial Sequence
  source: /note="Description of Artificial Sequence: Synthetic peptide"
  MOD_RES (8)..(8): Citrulline
VTGPQATXGQMLLEVS

SEQ ID NO: 480 - protein, 16 aa, Artificial Sequence
  source: /note="Description of Artificial Sequence: Synthetic peptide"
  MOD_RES (4)..(4): Citrulline
QATXGQMLLEVSYGGS

SEQ ID NO: 481 - protein, 16 aa, Artificial Sequence
  source: /note="Description of Artificial Sequence: Synthetic peptide"
  MOD_RES (7)..(7): Citrulline
NKLIHAXGTNLNKAMT

SEQ ID NO: 482 - protein, 16 aa, Artificial Sequence
  source: /note="Description of Artificial Sequence: Synthetic peptide"
  MOD_RES (3)..(3): Citrulline
HAXGTNLNKAMTLQEA

SEQ ID NO: 483 - protein, 16 aa, Artificial Sequence
  source: /note="Description of Artificial Sequence: Synthetic peptide"
  MOD_RES (9)..(10): Citrulline
AYDSPDFKXXGASVDD

SEQ ID NO: 484 - protein, 16 aa, Artificial Sequence
  source: /note="Description of Artificial Sequence: Synthetic peptide"
  MOD_RES (5)..(6): Citrulline
PDFKXXGASVDDFLKG

SEQ ID NO: 485 - protein, 16 aa, Artificial Sequence
  source: /note="Description of Artificial Sequence: Synthetic peptide"
  MOD_RES (1)..(2): Citrulline
XXGASVDDFLKGSELG

SEQ ID NO: 486 - protein, 16 aa, Artificial Sequence
  source: /note="Description of Artificial Sequence: Synthetic peptide"
  MOD_RES (9)..(9): Citrulline
DEYHTESSXGSDLSDI

SEQ ID NO: 487 - protein, 16 aa, Artificial Sequence
  source: /note="Description of Artificial Sequence: Synthetic peptide"
  MOD_RES (3)..(3): Citrulline
  MOD_RES (10)..(10): Citrulline
QSXGASLLQXLHNGNA

SEQ ID NO: 488 - protein, 16 aa, Artificial Sequence
  source: /note="Description of Artificial Sequence: Synthetic peptide"
  MOD_RES (8)..(8): Citrulline
  MOD_RES (10)..(10): Citrulline
GATVSETXLXGSSMAS

SEQ ID NO: 489 - protein, 16 aa, Artificial Sequence
  source: /note="Description of Artificial Sequence: Synthetic peptide"
  MOD_RES (4)..(4): Citrulline
  MOD_RES (6)..(6): Citrulline
SETXLXGSSMASSVAS

SEQ ID NO: 490 - protein, 16 aa, Artificial Sequence
  source: /note="Description of Artificial Sequence: Synthetic peptide"
  MOD_RES (13)..(13): Citrulline
EGSDGNKVKTFVXGGV

SEQ ID NO: 491 - protein, 16 aa, Artificial Sequence
  source: /note="Description of Artificial Sequence: Synthetic peptide"
  MOD_RES (9)..(9): Citrulline
GNKVKTFVXGGVVNAA

SEQ ID NO: 492 - protein, 16 aa, Artificial Sequence
  source: /note="Description of Artificial Sequence: Synthetic peptide"
  MOD_RES (5)..(5): Citrulline
KTFVXGGVVNAAKEEH

SEQ ID NO: 493 - protein, 16 aa, Artificial Sequence
  source: /note="Description of Artificial Sequence: Synthetic peptide"
  MOD_RES (3)..(3): Citrulline
  MOD_RES (10)..(10): Citrulline
LAXVLFTSTXGAKETV

SEQ ID NO: 494 - protein, 16 aa, Artificial Sequence
  source: /note="Description of Artificial Sequence: Synthetic peptide"
  MOD_RES (6)..(6): Citrulline
LFTSTXGAKETVKNLH

SEQ ID NO: 495 - protein, 16 aa, Artificial Sequence
  source: /note="Description of Artificial Sequence: Synthetic peptide"
  MOD_RES (12)..(12): Citrulline
PQSSQGTPYTSXGSTP

SEQ ID NO: 496 - protein, 16 aa, Artificial Sequence
  source: /note="Description of Artificial Sequence: Synthetic peptide"
  MOD_RES (8)..(8): Citrulline
QGTPYTSXGSTPYSQD

SEQ ID NO: 497 - protein, 16 aa, Artificial Sequence
  source: /note="Description of Artificial Sequence: Synthetic peptide"
  MOD_RES (4)..(4): Citrulline
YTSXGSTPYSQDSAYS

SEQ ID NO: 498 - protein, 16 aa, Artificial Sequence
  source: /note="Description of Artificial Sequence: Synthetic peptide"
  MOD_RES (12)..(12): Citrulline
PYALYAQGQEGXGAYS

SEQ ID NO: 499 - protein, 16 aa, Artificial Sequence
  source: /note="Description of Artificial Sequence: Synthetic peptide"
  MOD_RES (8)..(8): Citrulline
  MOD_RES (13)..(13): Citrulline
YAQGQEGXGAYSXEAY

SEQ ID NO: 500 - protein, 16 aa, Artificial Sequence
  source: /note="Description of Artificial Sequence: Synthetic peptide"
  MOD_RES (9)..(9): Citrulline
  MOD_RES (13)..(13): Citrulline
AFAFGSGLXGALXLPS

SEQ ID NO: 501 - protein, 16 aa, Artificial Sequence
  source: /note="Description of Artificial Sequence: Synthetic peptide"
  MOD_RES (6)..(6): Citrulline
  MOD_RES (9)..(9): Citrulline
LKTQLXGSXAQAQAQD

SEQ ID NO: 502 - protein, 16 aa, Artificial Sequence
  source: /note="Description of Artificial Sequence: Synthetic peptide"
  MOD_RES (2)..(2): Citrulline
  MOD_RES (5)..(5): Citrulline
LXGSXAQAQAQDAELV

SEQ ID NO: 503 - protein, 16 aa, Artificial Sequence
  source: /note="Description of Artificial Sequence: Synthetic peptide"
  MOD_RES (10)..(10): Citrulline
ALYSNLSGHXGSQTGT

SEQ ID NO: 504 - protein, 16 aa, Artificial Sequence
  source: /note="Description of Artificial Sequence: Synthetic peptide"
  MOD_RES (6)..(6): Citrulline
NLSGHXGSQTGTSIGG

SEQ ID NO: 505 - protein, 16 aa, Artificial Sequence
  source: /note="Description of Artificial Sequence: Synthetic peptide"
  MOD_RES (7)..(8): Citrulline
SIGGDAXXGFLGSGYS

SEQ ID NO: 506 - protein, 16 aa, Artificial Sequence
  source: /note="Description of Artificial Sequence: Synthetic peptide"
  MOD_RES (9)..(9): Citrulline
ISNFLNKSXGNNFTAN

SEQ ID NO: 507 - protein, 16 aa, Artificial Sequence
  source: /note="Description of Artificial Sequence: Synthetic peptide"
  MOD_RES (5)..(5): Citrulline
LNKSXGNNFTANQNND

SEQ ID NO: 508 - protein, 16 aa, Artificial Sequence
  source: /note="Description of Artificial Sequence: Synthetic peptide"
  MOD_RES (14)..(14): Citrulline
SSGTPASQLYPQSXGL

SEQ ID NO: 509 - protein, 15 aa, Artificial Sequence
  source: /note="Description of Artificial Sequence: Synthetic peptide"
  MOD_RES (10)..(10): Citrulline
PASQLYPQSXGLVPK

SEQ ID NO: 510 - protein, 16 aa, Artificial Sequence
  source: /note="Description of Artificial Sequence: Synthetic peptide"
  MOD_RES (6)..(6): Citrulline
  MOD_RES (13)..(13): Citrulline
PQTSDXGAYLSQXQEL

SEQ ID NO: 511 - protein, 16 aa, Artificial Sequence
  source: /note="Description of Artificial Sequence: Synthetic peptide"
  MOD_RES (2)..(2): Citrulline
  MOD_RES (9)..(9): Citrulline
DXGAYLSQXQELISEV

SEQ ID NO: 512 - protein, 16 aa, Artificial Sequence
  source: /note="Description of Artificial Sequence: Synthetic peptide"
  MOD_RES (2)..(2): Citrulline
  MOD_RES (6)..(6): Citrulline
VXGSGXSGKTIPELEK

SEQ ID NO: 513 - protein, 16 aa, Artificial Sequence
  source: /note="Description of Artificial Sequence: Synthetic peptide"
  MOD_RES (7)..(7): Citrulline
  MOD_RES (12)..(12): Citrulline
AKDKWGXTALHXGAVT

SEQ ID NO: 514 - protein, 16 aa, Artificial Sequence
  source: /note="Description of Artificial Sequence: Synthetic peptide"
  MOD_RES (3)..(3): Citrulline
  MOD_RES (8)..(8): Citrulline
WGXTALHXGAVTGHEE

SEQ ID NO: 515 - protein, 16 aa, Artificial Sequence
  source: /note="Description of Artificial Sequence: Synthetic peptide"
  MOD_RES (9)..(9): Citrulline
YQAWQLMAXGMAMEHG

SEQ ID NO: 516 - protein, 16 aa, Artificial Sequence
  source: /note="Description of Artificial Sequence: Synthetic peptide"
  MOD_RES (5)..(5): Citrulline
QLMAXGMAMEHGFLSK

SEQ ID NO: 517 - protein, 16 aa, Artificial Sequence
  source: /note="Description of Artificial Sequence: Synthetic peptide"
  MOD_RES (2)..(2): Citrulline
  MOD_RES (7)..(7): Citrulline
IXPDILXGAFKGLPGI

SEQ ID NO: 518 - protein, 16 aa, Artificial Sequence
  source: /note="Description of Artificial Sequence: Synthetic peptide"
  MOD_RES (3)..(3): Citrulline
  MOD_RES (15)..(15): Citrulline
ILXGAFKGLPGIDFXG

SEQ ID NO: 519 - protein, 16 aa, Artificial Sequence
  source: /note="Description of Artificial Sequence: Synthetic peptide"
  MOD_RES (7)..(7): Citrulline
NWDPQQXGGPVDLTLK

SEQ ID NO: 520 - protein, 16 aa, Artificial Sequence
  source: /note="Description of Artificial Sequence: Synthetic peptide"
  MOD_RES (15)..(15): Citrulline
VHLEAKELWDQFHKXG

SEQ ID NO: 521 - protein, 16 aa, Artificial Sequence
  source: /note="Description of Artificial Sequence: Synthetic peptide"
  MOD_RES (11)..(11): Citrulline
AKELWDQFHKXGTEMV

SEQ ID NO: 522 - protein, 16 aa, Artificial Sequence
  source: /note="Description of Artificial Sequence: Synthetic peptide"
  MOD_RES (7)..(7): Citrulline
WDQFHKXGTEMVITKS

SEQ ID NO: 523 - protein, 16 aa, Artificial Sequence
  source: /note="Description of Artificial Sequence: Synthetic peptide"
  MOD_RES (10)..(10): Citrulline
SPSASSVGSXGSSGSS

SEQ ID NO: 524 - protein, 16 aa, Artificial Sequence
  source: /note="Description of Artificial Sequence: Synthetic peptide"
  MOD_RES (6)..(6): Citrulline
SSVGSXGSSGSSSKPA

SEQ ID NO: 525 - protein, 16 aa, Artificial Sequence
  source: /note="Description of Artificial Sequence: Synthetic peptide"
  MOD_RES (2)..(2): Citrulline
SXGSSGSSSKPAGADS

SEQ ID NO: 526 - protein, 16 aa, Artificial Sequence
  source: /note="Description of Artificial Sequence: Synthetic peptide"
  MOD_RES (5)..(5): Citrulline
  MOD_RES (8)..(8): Citrulline
SNAHXGSXLQFQQNNA

SEQ ID NO: 527 - protein, 16 aa, Artificial Sequence
  source: /note="Description of Artificial Sequence: Synthetic peptide"
  MOD_RES (1)..(1): Citrulline
  MOD_RES (4)..(4): Citrulline
XGSXLQFQQNNAESTI

SEQ ID NO: 528 - protein, 16 aa, Artificial Sequence
  source: /note="Description of Artificial Sequence: Synthetic peptide"
  MOD_RES (2)..(2): Citrulline
  MOD_RES (9)..(9): Citrulline
FXESCVFHXGNYVKDL

SEQ ID NO: 529 - protein, 16 aa, Artificial Sequence
  source: /note="Description of Artificial Sequence: Synthetic peptide"
  MOD_RES (5)..(5): Citrulline
  MOD_RES (14)..(14): Citrulline
CVFHXGNYVKDLSXLG

SEQ ID NO: 530 - protein, 16 aa, Artificial Sequence
  source: /note="Description of Artificial Sequence: Synthetic peptide"
  MOD_RES (5)..(5): Citrulline
  MOD_RES (15)..(15): Citrulline
YQPAXGDKACQACPXG

SEQ ID NO: 531 - protein, 16 aa, Artificial Sequence
  source: /note="Description of Artificial Sequence: Synthetic peptide"
  MOD_RES (1)..(1): Citrulline
  MOD_RES (11)..(11): Citrulline
XGDKACQACPXGLYKS

SEQ ID NO: 532 - protein, 16 aa, Artificial Sequence
  source: /note="Description of Artificial Sequence: Synthetic peptide"
  MOD_RES (7)..(7): Citrulline
ACQACPXGLYKSSAGN

SEQ ID NO: 533 - protein, 16 aa, Artificial Sequence
  source: /note="Description of Artificial Sequence: Synthetic peptide"
  MOD_RES (3)..(3): Citrulline
CPXGLYKSSAGNAPCS

SEQ ID NO: 534 - protein, 16 aa, Artificial Sequence
  source: /note="Description of Artificial Sequence: Synthetic peptide"
  MOD_RES (10)..(10): Citrulline
DYTETLYSPXGEEITT

SEQ ID NO: 535 - protein, 16 aa, Artificial Sequence
  source: /note="Description of Artificial Sequence: Synthetic peptide"
  MOD_RES (3)..(3): Citrulline
  MOD_RES (12)..(12): Citrulline
VEXWQGQYEGLXGQDL

SEQ ID NO: 536 - protein, 16 aa, Artificial Sequence
  source: /note="Description of Artificial Sequence: Synthetic peptide"
  MOD_RES (12)..(12): Citrulline
  MOD_RES (15)..(15): Citrulline
GGGGSGSLPSQXGGXT

SEQ ID NO: 537 - protein, 16 aa, Artificial Sequence
  source: /note="Description of Artificial Sequence: Synthetic peptide"
  MOD_RES (8)..(8): Citrulline
  MOD_RES (11)..(11): Citrulline
SGSLPSQXGGXTGALH

SEQ ID NO: 538 - protein, 16 aa, Artificial Sequence
  source: /note="Description of Artificial Sequence: Synthetic peptide"
  MOD_RES (13)..(13): Citrulline
ATIASAIPAYSKXGDI

SEQ ID NO: 539 - protein, 16 aa, Artificial Sequence
  source: /note="Description of Artificial Sequence: Synthetic peptide"
  MOD_RES (9)..(9): Citrulline
SAIPAYSKXGDIVFVD

SEQ ID NO: 540 - protein, 16 aa, Artificial Sequence
  source: /note="Description of Artificial Sequence: Synthetic peptide"
  MOD_RES (5)..(5): Citrulline
  MOD_RES (13)..(13): Citrulline
AYSKXGDIVFVDXAAC

SEQ ID NO: 541 - protein, 16 aa, Artificial Sequence
  source: /note="Description of Artificial Sequence: Synthetic peptide"
  MOD_RES (10)..(10): Citrulline
SNLGNVYKEXGQLQEA

SEQ ID NO: 542 - protein, 16 aa, Artificial Sequence
  source: /note="Description of Artificial Sequence: Synthetic peptide"
  MOD_RES (6)..(6): Citrulline
NVYKEXGQLQEAIEHY

SEQ ID NO: 543 - protein, 16 aa, Artificial Sequence
  source: /note="Description of Artificial Sequence: Synthetic peptide"
  MOD_RES (7)..(7): Citrulline
VDPEQAXGVLKCDMSD

SEQ ID NO: 544 - protein, 16 aa, Artificial Sequence
  source: /note="Description of Artificial Sequence: Synthetic peptide"
  MOD_RES (3)..(3): Citrulline
QAXGVLKCDMSDLSLI

SEQ ID NO: 545 - protein, 16 aa, Artificial Sequence
  source: /note="Description of Artificial Sequence: Synthetic peptide"
  MOD_RES (8)..(8): Citrulline
  MOD_RES (11)..(11): Citrulline
PGPTGAPXAAXGQMLI

SEQ ID NO: 546 - protein, 16 aa, Artificial Sequence
  source: /note="Description of Artificial Sequence: Synthetic peptide"
  MOD_RES (4)..(4): Citrulline
  MOD_RES (7)..(7): Citrulline
GAPXAAXGQMLIGPDG

SEQ ID NO: 547 - protein, 16 aa, Artificial Sequence
  source: /note="Description of Artificial Sequence: Synthetic peptide"
  MOD_RES (12)..(12): Citrulline
YLDHNKVTELPXGLLS

SEQ ID NO: 548 - protein, 16 aa, Artificial Sequence
  source: /note="Description of Artificial Sequence: Synthetic peptide"
  MOD_RES (3)..(3): Citrulline
  MOD_RES (11)..(11): Citrulline
SHXGEETGNIXGSMKV

SEQ ID NO: 549 - protein, 16 aa, Artificial Sequence
  source: /note="Description of Artificial Sequence: Synthetic peptide"
  MOD_RES (7)..(7): Citrulline
  MOD_RES (13)..(13): Citrulline
EETGNIXGSMKVXVPT

SEQ ID NO: 550 - protein, 16 aa, Artificial Sequence
  source: /note="Description of Artificial Sequence: Synthetic peptide"
  MOD_RES (2)..(2): Citrulline
  MOD_RES (9)..(9): Citrulline
WXQKLDSQXGAVIATE

SEQ ID NO: 551 - protein, 16 aa, Artificial Sequence
  source: /note="Description of Artificial Sequence: Synthetic peptide"
  MOD_RES (5)..(5): Citrulline
LDSQXGAVIATELKNN

SEQ ID NO: 552 - protein, 16 aa, Artificial Sequence
  source: /note="Description of Artificial Sequence: Synthetic peptide"
  MOD_RES (9)..(9): Citrulline
GETKVVSHXGKTLQDI

SEQ ID NO: 553 - protein, 16 aa, Artificial Sequence
  source: /note="Description of Artificial Sequence: Synthetic peptide"
  MOD_RES (5)..(5): Citrulline
VVSHXGKTLQDIPEDF

SEQ ID NO: 554 - protein, 16 aa, Artificial Sequence
  source: /note="Description of Artificial Sequence: Synthetic peptide"
  MOD_RES (8)..(8): Citrulline
MEVGFKAXGQPKSAHS

SEQ ID NO: 555 - protein, 16 aa, Artificial Sequence
  source: /note="Description of Artificial Sequence: Synthetic peptide"
  MOD_RES (4)..(4): Citrulline
FKAXGQPKSAHSPFAS

SEQ ID NO: 556 - protein, 16 aa, Artificial Sequence
  source: /note="Description of Artificial Sequence: Synthetic peptide"
  MOD_RES (8)..(8): Citrulline
GWGFNLPXGQALLEKW

SEQ ID NO: 557 - protein, 16 aa, Artificial Sequence
  source: /note="Description of Artificial Sequence: Synthetic peptide"
  MOD_RES (4)..(4): Citrulline
NLPXGQALLEKWNLIP

SEQ ID NO: 558 - protein, 16 aa, Artificial Sequence
  source: /note="Description of Artificial Sequence: Synthetic peptide"
  MOD_RES (8)..(8): Citrulline
  MOD_RES (12)..(12): Citrulline
IVAVVEGXGLAXGEIG

SEQ ID NO: 559 - protein, 16 aa, Artificial Sequence
  source: /note="Description of Artificial Sequence: Synthetic peptide"
  MOD_RES (4)..(4): Citrulline
  MOD_RES (8)..(8): Citrulline
VEGXGLAXGEIGMASI

SEQ ID NO: 560 - protein, 16 aa, Artificial Sequence
  source: /note="Description of Artificial Sequence: Synthetic peptide"
  MOD_RES (4)..(4): Citrulline
GLAXGEIGMASIDLKN

SEQ ID NO: 561 - protein, 16 aa, Artificial Sequence
  source: /note="Description of Artificial Sequence: Synthetic peptide"
  MOD_RES (4)..(4): Citrulline
  MOD_RES (12)..(12): Citrulline
DTYXLDPGTISXGELP

SEQ ID NO: 562 - protein, 16 aa, Artificial Sequence
  source: /note="Description of Artificial Sequence: Synthetic peptide"
  MOD_RES (8)..(8): Citrulline
LDPGTISXGELPGTKY

SEQ ID NO: 563 - protein, 16 aa, Artificial Sequence
  source: /note="Description of Artificial Sequence: Synthetic peptide"
  MOD_RES (4)..(4): Citrulline
TISXGELPGTKYQAML

SEQ ID NO: 564 - protein, 16 aa, Artificial Sequence
  source: /note="Description of Artificial Sequence: Synthetic peptide"
  MOD_RES (9)..(9): Citrulline
  MOD_RES (15)..(15): Citrulline
VSNKWFHEXGQEFLXP

SEQ ID NO: 565 - protein, 16 aa, Artificial Sequence
  source: /note="Description of Artificial Sequence: Synthetic peptide"
  MOD_RES (5)..(5): Citrulline
  MOD_RES (11)..(11): Citrulline
WFHEXGQEFLXPCGST

SEQ ID NO: 566 - protein, 16 aa, Artificial Sequence
  source: /note="Description of Artificial Sequence: Synthetic peptide"
  MOD_RES (3)..(3): Citrulline
  MOD_RES (7)..(7): Citrulline
EKXQQTXGQTQDHQGA

SEQ ID NO: 567 - protein, 16 aa, Artificial Sequence
  source: /note="Description of Artificial Sequence: Synthetic peptide"
  MOD_RES (3)..(3): Citrulline
QTXGQTQDHQGAQITA

SEQ ID NO: 568 - protein, 16 aa, Artificial Sequence
  source: /note="Description of Artificial Sequence: Synthetic peptide"
  MOD_RES (10)..(10): Citrulline
  MOD_RES (12)..(12): Citrulline
DLPNNGTVTXGXGFPK

SEQ ID NO: 569 - protein, 16 aa, Artificial Sequence
  source: /note="Description of Artificial Sequence: Synthetic peptide"
  MOD_RES (6)..(6): Citrulline
  MOD_RES (8)..(8): Citrulline
NGTVTXGXGFPKTGLL

SEQ ID NO: 570 - protein, 16 aa, Artificial Sequence
  source: /note="Description of Artificial Sequence: Synthetic peptide"
  MOD_RES (2)..(2): Citrulline
  MOD_RES (4)..(4): Citrulline
TXGXGFPKTGLLLNLL

SEQ ID NO: 571 - protein, 16 aa, Artificial Sequence
  source: /note="Description of Artificial Sequence: Synthetic peptide"
  MOD_RES (5)..(5): Citrulline
  MOD_RES (12)..(12): Citrulline
QLFEXMLKVHSXGGLI

SEQ ID NO: 572 - protein, 16 aa, Artificial Sequence
  source: /note="Description of Artificial Sequence: Synthetic peptide"
  MOD_RES (1)..(1): Citrulline
  MOD_RES (8)..(8): Citrulline
XMLKVHSXGGLISASI

SEQ ID NO: 573 - protein, 16 aa, Artificial Sequence
  source: /note="Description of Artificial Sequence: Synthetic peptide"
  MOD_RES (11)..(11): Citrulline
  MOD_RES (16)..(16): Citrulline
GSSSSGFGASXGSSSX

SEQ ID NO: 574 - protein, 16 aa, Artificial Sequence
  source: /note="Description of Artificial Sequence: Synthetic peptide"
  MOD_RES (7)..(7): Citrulline
  MOD_RES (12)..(12): Citrulline
SGFGASXGSSSXSGGG

SEQ ID NO: 575 - protein, 16 aa, Artificial Sequence
  source: /note="Description of Artificial Sequence: Synthetic peptide"
  MOD_RES (3)..(3): Citrulline
  MOD_RES (8)..(8): Citrulline
ASXGSSSXSGGGGYGN

SEQ ID NO: 576 - protein, 16 aa, Artificial Sequence
  source: /note="Description of Artificial Sequence: Synthetic peptide"
  MOD_RES (4)..(4): Citrulline
  MOD_RES (14)..(14): Citrulline
SSSXSGGGGYGNSXGF

SEQ ID NO: 577 - protein, 16 aa, Artificial Sequence
  source: /note="Description of Artificial Sequence: Synthetic peptide"
  MOD_RES (9)..(9): Citrulline
  MOD_RES (15)..(15): Citrulline
GLEVEWELXGGPGGXS

SEQ ID NO: 578 - protein, 16 aa, Artificial Sequence
  source: /note="Description of Artificial Sequence: Synthetic peptide"
  MOD_RES (5)..(5): Citrulline
  MOD_RES (11)..(11): Citrulline
EWELXGGPGGXSQKAE

SEQ ID NO: 579 - protein, 16 aa, Artificial Sequence
  source: /note="Description of Artificial Sequence: Synthetic peptide"
  MOD_RES (7)..(7): Citrulline
  MOD_RES (12)..(12): Citrulline
SNGHESXGASQXSSHS

SEQ ID NO: 580 - protein, 16 aa, Artificial Sequence
  source: /note="Description of Artificial Sequence: Synthetic peptide"
  MOD_RES (3)..(3): Citrulline
  MOD_RES (8)..(8): Citrulline
ESXGASQXSSHSSSSG

SEQ ID NO: 581 - protein, 16 aa, Artificial Sequence
  source: /note="Description of Artificial Sequence: Synthetic peptide"
  MOD_RES (8)..(8): Citrulline
PLPVFSPXGGPQPLPP

SEQ ID NO: 582 - protein, 16 aa, Artificial Sequence
  source: /note="Description of Artificial Sequence: Synthetic peptide"
  MOD_RES (4)..(4): Citrulline
FSPXGGPQPLPPAPTS

SEQ ID NO: 583 - protein, 16 aa, Artificial Sequence
  source: /note="Description of Artificial Sequence: Synthetic peptide"
  MOD_RES (6)..(6): Citrulline
NGLLPXGQLEPPLWTQ

SEQ ID NO: 584 - protein, 16 aa, Artificial Sequence
  source: /note="Description of Artificial Sequence: Synthetic peptide"
  MOD_RES (2)..(2): Citrulline
PXGQLEPPLWTQQGKG

SEQ ID NO: 585 - protein, 16 aa, Artificial Sequence
  source: /note="Description of Artificial Sequence: Synthetic peptide"
  MOD_RES (7)..(7): Citrulline
LAFALAXGSVAKVMSS

SEQ ID NO: 586 - protein, 16 aa, Artificial Sequence
  source: /note="Description of Artificial Sequence: Synthetic peptide"
  MOD_RES (8)..(8): Citrulline
  MOD_RES (10)..(10): Citrulline
AASHSGGXLXGKPWSP

SEQ ID NO: 587 - protein, 16 aa, Artificial Sequence
  source: /note="Description of Artificial Sequence: Synthetic peptide"
  MOD_RES (4)..(4): Citrulline
  MOD_RES (6)..(6): Citrulline
SGGXLXGKPWSPCKFG

SEQ ID NO: 588 - protein, 16 aa, Artificial Sequence
  source: /note="Description of Artificial Sequence: Synthetic peptide"
  MOD_RES (10)..(10): Citrulline
  MOD_RES (15)..(15): Citrulline
AGEPLLFVGXGYTSXG

SEQ ID NO: 589 - protein, 16 aa, Artificial Sequence
  source: /note="Description of Artificial Sequence: Synthetic peptide"
  MOD_RES (6)..(6): Citrulline
  MOD_RES (11)..(11): Citrulline
LLFVGXGYTSXGVGGG

SEQ ID NO: 590 - protein, 16 aa, Artificial Sequence
  source: /note="Description of Artificial Sequence: Synthetic peptide"
  MOD_RES (2)..(2): Citrulline
  MOD_RES (7)..(7): Citrulline
GXGYTSXGVGGGIPPI

SEQ ID NO: 591 - protein, 16 aa, Artificial Sequence
  source: /note="Description of Artificial Sequence: Synthetic peptide"
  MOD_RES (7)..(7): Citrulline
  MOD_RES (11)..(11): Citrulline
PVDGGTXVTIXGSNLG

SEQ ID NO: 592 - protein, 16 aa, Artificial Sequence
  source: /note="Description of Artificial Sequence: Synthetic peptide"
  MOD_RES (3)..(3): Citrulline
  MOD_RES (7)..(7): Citrulline
GTXVTIXGSNLGQHVQ

SEQ ID NO: 593 - protein, 16 aa, Artificial Sequence
  source: /note="Description of Artificial Sequence: Synthetic peptide"
  MOD_RES (3)..(3): Citrulline
TIXGSNLGQHVQDVLG

SEQ ID NO: 594 - protein, 16 aa, Artificial Sequence
  source: /note="Description of Artificial Sequence: Synthetic peptide"
  MOD_RES (4)..(4): Citrulline
  MOD_RES (9)..(9): Citrulline
SGGXEICVXGQNLDVV

SEQ ID NO: 595 - protein, 16 aa, Artificial Sequence
  source: /note="Description of Artificial Sequence: Synthetic peptide"
  MOD_RES (5)..(5): Citrulline
  MOD_RES (16)..(16): Citrulline
EICVXGQNLDVVQTPX

SEQ ID NO: 596 - protein, 16 aa, Artificial Sequence
  source: /note="Description of Artificial Sequence: Synthetic peptide"
  MOD_RES (4)..(4): Citrulline
  MOD_RES (12)..(12): Citrulline
IIFXTSELMTLXGSVL

SEQ ID NO: 597 - protein, 16 aa, Artificial Sequence
  source: /note="Description of Artificial Sequence: Synthetic peptide"
  MOD_RES (8)..(8): Citrulline
TSELMTLXGSVLEDAI

SEQ ID NO: 598 - protein, 16 aa, Artificial Sequence
  source: /note="Description of Artificial Sequence: Synthetic peptide"
  MOD_RES (4)..(4): Citrulline
MTLXGSVLEDAIPSTA

SEQ ID NO: 599 - protein, 16 aa, Artificial Sequence
  source: /note="Description of Artificial Sequence: Synthetic peptide"
  MOD_RES (10)..(10): Citrulline
PSTAKHSTAXGLPLKE

SEQ ID NO: 600 - protein, 16 aa, Artificial Sequence
  source: /note="Description of Artificial Sequence: Synthetic peptide"
  MOD_RES (6)..(6): Citrulline
KHSTAXGLPLKEVLEH

SEQ ID NO: 601 - protein, 16 aa, Artificial Sequence
  source: /note="Description of Artificial Sequence: Synthetic peptide"
  MOD_RES (2)..(2): Citrulline
AXGLPLKEVLEHVVPE

SEQ ID NO: 602 - protein, 16 aa, Artificial Sequence
  source: /note="Description of Artificial Sequence: Synthetic peptide"
  MOD_RES (8)..(8): Citrulline
VDFFVEHXGQLKVQLA

SEQ ID NO: 603 - protein, 16 aa, Artificial Sequence
  source: /note="Description of Artificial Sequence: Synthetic peptide"
  MOD_RES (4)..(4): Citrulline
VEHXGQLKVQLAWPGN

SEQ ID NO: 604 - protein, 16 aa, Artificial Sequence
  source: /note="Description of Artificial Sequence: Synthetic peptide"
  MOD_RES (8)..(8): Citrulline
DYEVPLGXGGLKKSMA

SEQ ID NO: 605 - protein, 16 aa, Artificial Sequence
  source: /note="Description of Artificial Sequence: Synthetic peptide"
  MOD_RES (4)..(4): Citrulline
PLGXGGLKKSMAWDLP

SEQ ID NO: 606 - protein, 16 aa, Artificial Sequence
  source: /note="Description of Artificial Sequence: Synthetic peptide"
  MOD_RES (10)..(10): Citrulline
LSPGTGGGVXGGVGYL

SEQ ID NO: 607 - protein, 16 aa, Artificial Sequence
  source: /note="Description of Artificial Sequence: Synthetic peptide"
  MOD_RES (6)..(6): Citrulline
  MOD_RES (14)..(14): Citrulline
TGGGVXGGVGYLSXGD

SEQ ID NO: 608 - protein, 16 aa, Artificial Sequence
  source: /note="Description of Artificial Sequence: Synthetic peptide"
  MOD_RES (10)..(10): Citrulline
NSTHYVVFPXGSLEET

SEQ ID NO: 609 - protein, 16 aa, Artificial Sequence
  source: /note="Description of Artificial Sequence: Synthetic peptide"
  MOD_RES (6)..(6): Citrulline
YVVFPXGSLEETVQAM

SEQ ID NO: 610 - protein, 16 aa, Artificial Sequence
  source: /note="Description of Artificial Sequence: Synthetic peptide"
  MOD_RES (1)..(1): Citrulline
  MOD_RES (11)..(11): Citrulline
XQKLSCCPTCXGALTP

SEQ ID NO: 611 - protein, 16 aa, Artificial Sequence
  source: /note="Description of Artificial Sequence: Synthetic peptide"
  MOD_RES (7)..(7): Citrulline
  MOD_RES (15)..(15): Citrulline
SCCPTCXGALTPSIXN

SEQ ID NO: 612 - protein, 16 aa, Artificial Sequence
  source: /note="Description of Artificial Sequence: Synthetic peptide"
  MOD_RES (11)..(11): Citrulline
EGWCFGAKLVXGAYLA

SEQ ID NO: 613 - protein, 16 aa, Artificial Sequence
  source: /note="Description of Artificial Sequence: Synthetic peptide"
  MOD_RES (7)..(7): Citrulline
  MOD_RES (15)..(15): Citrulline
FGAKLVXGAYLAQEXA

SEQ ID NO: 614 - protein, 16 aa, Artificial Sequence
  source: /note="Description of Artificial Sequence: Synthetic peptide"
  MOD_RES (11)..(11): Citrulline
SCNNFIYGGCXGNKNS

SEQ ID NO: 615 - protein, 16 aa, Artificial Sequence
  source: /note="Description of Artificial Sequence: Synthetic peptide"
  MOD_RES (7)..(7): Citrulline
  MOD_RES (14)..(14): Citrulline
FIYGGCXGNKNSYXSE

SEQ ID NO: 616 - protein, 16 aa, Artificial Sequence
  source: /note="Description of Artificial Sequence: Synthetic peptide"
  MOD_RES (5)..(6): Citrulline
SDLSXXGVPTQAKGLC

SEQ ID NO: 617 - protein, 16 aa, Artificial Sequence
  source: /note="Description of Artificial Sequence: Synthetic peptide"
  MOD_RES (1)..(2): Citrulline
XXGVPTQAKGLCGSCN

SEQ ID NO: 618 - protein, 16 aa, Artificial Sequence
  source: /note="Description of Artificial Sequence: Synthetic peptide"
  MOD_RES (8)..(9): Citrulline
CENHFHAXXGSLCATC

SEQ ID NO: 619 - protein, 16 aa, Artificial Sequence
  source: /note="Description of Artificial Sequence: Synthetic peptide"
  MOD_RES (4)..(5): Citrulline
FHAXXGSLCATCGLPV

SEQ ID NO: 620 - protein, 16 aa, Artificial Sequence
  source: /note="Description of Artificial Sequence: Synthetic peptide"
  MOD_RES (9)..(9): Citrulline
FQSEAPLKXGIVSAQD

SEQ ID NO: 621 - protein, 16 aa, Artificial Sequence
  source: /note="Description of Artificial Sequence: Synthetic peptide"
  MOD_RES (5)..(5): Citrulline
APLKXGIVSAQDASLQ

SEQ ID NO: 622 - protein, 16 aa, Artificial Sequence
  source: /note="Description of Artificial Sequence: Synthetic peptide"
  MOD_RES (8)..(9): Citrulline
WQDDAFIXXGGPGKGK

SEQ ID NO: 623 - protein, 16 aa, Artificial Sequence
  source: /note="Description of Artificial Sequence: Synthetic peptide"
  MOD_RES (4)..(5): Citrulline
AFIXXGGPGKGKELGL

SEQ ID NO: 624 - protein, 16 aa, Artificial Sequence
  source: /note="Description of Artificial Sequence: Synthetic peptide"
  MOD_RES (9)..(9): Citrulline
  MOD_RES (11)..(11): Citrulline
LDSSCSFSXGXAPPQQ

SEQ ID NO: 625 - protein, 16 aa, Artificial Sequence
  source: /note="Description of Artificial Sequence: Synthetic peptide"
  MOD_RES (5)..(5): Citrulline
  MOD_RES (7)..(7): Citrulline
CSFSXGXAPPQQNGSK

SEQ ID NO: 626 - protein, 16 aa, Artificial Sequence
  source: /note="Description of Artificial Sequence: Synthetic peptide"
  MOD_RES (1)..(1): Citrulline
  MOD_RES (3)..(3): Citrulline
XGXAPPQQNGSKDNSL

SEQ ID NO: 627 - protein, 16 aa, Artificial Sequence
  source: /note="Description of Artificial Sequence: Synthetic peptide"
  MOD_RES (12)..(12): Citrulline
DTVNKLHPVYSXGVLS

SEQ ID NO: 628 - protein, 16 aa, Artificial Sequence
  source: /note="Description of Artificial Sequence: Synthetic peptide"
  MOD_RES (8)..(8): Citrulline
  MOD_RES (15)..(15): Citrulline
KLHPVYSXGVLSPEXH

SEQ ID NO: 629 - protein, 16 aa, Artificial Sequence
  source: /note="Description of Artificial Sequence: Synthetic peptide"
  MOD_RES (3)..(3): Citrulline
  MOD_RES (12)..(12): Citrulline
FQXGQYPDSVAXGKLA

SEQ ID NO: 630 - protein, 16 aa, Artificial Sequence
  source: /note="Description of Artificial Sequence: Synthetic peptide"
  MOD_RES (8)..(8): Citrulline
QYPDSVAXGKLATATS

SEQ ID NO: 631 - protein, 16 aa, Artificial Sequence
  source: /note="Description of Artificial Sequence: Synthetic peptide"
  MOD_RES (5)..(5): Citrulline
  MOD_RES (12)..(12): Citrulline
SESGXLSLGASXGSSV

SEQ ID NO: 632 - protein, 16 aa, Artificial Sequence
  source: /note="Description of Artificial Sequence: Synthetic peptide"
  MOD_RES (1)..(1): Citrulline
  MOD_RES (8)..(8): Citrulline
XLSLGASXGSSVESLP

SEQ ID NO: 633 - protein, 16 aa, Artificial Sequence
  source: /note="Description of Artificial Sequence: Synthetic peptide"
  MOD_RES (5)..(5): Citrulline
PAGSXGSPVPAGALQP

SEQ ID NO: 634 - protein, 16 aa, Artificial Sequence
  source: /note="Description of Artificial Sequence: Synthetic peptide"
  MOD_RES (9)..(9): Citrulline
  MOD_RES (14)..(14): Citrulline
PIAITCFTXGLDIXKE

SEQ ID NO: 635 - protein, 16 aa, Artificial Sequence
  source: /note="Description of Artificial Sequence: Synthetic peptide"
  MOD_RES (5)..(5): Citrulline
  MOD_RES (10)..(10): Citrulline
TCFTXGLDIXKEKADV

SEQ ID NO: 636 - protein, 16 aa, Artificial Sequence
  source: /note="Description of Artificial Sequence: Synthetic peptide"
  MOD_RES (2)..(2): Citrulline
  MOD_RES (8)..(8): Citrulline
WXIKWKHXGKDIELPS

SEQ ID NO: 637 - protein, 16 aa, Artificial Sequence
  source: /note="Description of Artificial Sequence: Synthetic peptide"
  MOD_RES (4)..(4): Citrulline
WKHXGKDIELPSTIYE

SEQ ID NO: 638 - protein, 16 aa, Artificial Sequence
  source: /note="Description of Artificial Sequence: Synthetic peptide"
  MOD_RES (11)..(11): Citrulline
  MOD_RES (14)..(14): Citrulline
LGTNYGEELGXGVXKL

SEQ ID NO: 639 - protein, 16 aa, Artificial Sequence
  source: /note="Description of Artificial Sequence: Synthetic peptide"
  MOD_RES (7)..(7): Citrulline
  MOD_RES (10)..(10): Citrulline
YGEELGXGVXKLGCWN

SEQ ID NO: 640 - protein, 16 aa, Artificial Sequence
  source: /note="Description of Artificial Sequence: Synthetic peptide"
  MOD_RES (3)..(3): Citrulline
  MOD_RES (12)..(12): Citrulline
FKXVFKVVEEMXGSLV

SEQ ID NO: 641 - protein, 16 aa, Artificial Sequence
  source: /note="Description of Artificial Sequence: Synthetic peptide"
  MOD_RES (6)..(6): Citrulline
  MOD_RES (12)..(12): Citrulline
FADFGXQTPGGXGVPL

SEQ ID NO: 642 - protein, 16 aa, Artificial Sequence
  source: /note="Description of Artificial Sequence: Synthetic peptide"
  MOD_RES (2)..(2): Citrulline
  MOD_RES (8)..(8): Citrulline
GXQTPGGXGVPLLNVG

SEQ ID NO: 643 - protein, 16 aa, Artificial Sequence
  source: /note="Description of Artificial Sequence: Synthetic peptide"
  MOD_RES (3)..(3): Citrulline
  MOD_RES (9)..(9): Citrulline
TAXPNTFMXGGSSKDL

SEQ ID NO: 644 - protein, 16 aa, Artificial Sequence
  source: /note="Description of Artificial Sequence: Synthetic peptide"
  MOD_RES (5)..(5): Citrulline
NTFMXGGSSKDLLDNQ

SEQ ID NO: 645 - protein, 16 aa, Artificial Sequence
  source: /note="Description of Artificial Sequence: Synthetic peptide"
  MOD_RES (10)..(10): Citrulline
YYTGVDINAXGEWKTL

SEQ ID NO: 646 - protein, 16 aa, Artificial Sequence
  source: /note="Description of Artificial Sequence: Synthetic peptide"
  MOD_RES (6)..(6): Citrulline
VDINAXGEWKTLPAPL

SEQ ID NO: 647 - protein, 16 aa, Artificial Sequence
  source: /note="Description of Artificial Sequence: Synthetic peptide"
  MOD_RES (5)..(5): Citrulline
  MOD_RES (10)..(10): Citrulline
AAAVXAFLEXGHTELD

SEQ ID NO: 648 - protein, 16 aa, Artificial Sequence
  source: /note="Description of Artificial Sequence: Synthetic peptide"
  MOD_RES (1)..(1): Citrulline
  MOD_RES (6)..(6): Citrulline
XAFLEXGHTELDTAFM

SEQ ID NO: 649 - protein, 16 aa, Artificial Sequence
  source: /note="Description of Artificial Sequence: Synthetic peptide"
  MOD_RES (5)..(5): Citrulline
  MOD_RES (12)..(12): Citrulline
CGYDXHATPTTXGCVS

SEQ ID NO: 650 - protein, 16 aa, Artificial Sequence
  source: /note="Description of Artificial Sequence: Synthetic peptide"
  MOD_RES (1)..(1): Citrulline
  MOD_RES (8)..(8): Citrulline
XHATPTTXGCVSNTGG

SEQ ID NO: 651 - protein, 16 aa, Artificial Sequence
  source: /note="Description of Artificial Sequence: Synthetic peptide"
  MOD_RES (1)..(1): Citrulline
  MOD_RES (6)..(6): Citrulline
XTASGXGSASEHQDCN

SEQ ID NO: 652 - protein, 16 aa, Artificial Sequence
  source: /note="Description of Artificial Sequence: Synthetic peptide"
  MOD_RES (8)..(8): Citrulline
  MOD_RES (11)..(11): Citrulline
LDASGDYXVYXGLLKT

SEQ ID NO: 653 - protein, 16 aa, Artificial Sequence
  source: /note="Description of Artificial Sequence: Synthetic peptide"
  MOD_RES (4)..(4): Citrulline
  MOD_RES (7)..(7): Citrulline
GDYXVYXGLLKTTMDP

SEQ ID NO: 654 - protein, 16 aa, Artificial Sequence
  source: /note="Description of Artificial Sequence: Synthetic peptide"
  MOD_RES (3)..(3): Citrulline
VYXGLLKTTMDPNDVI

SEQ ID NO: 655 - protein, 16 aa, Artificial Sequence
  source: /note="Description of Artificial Sequence: Synthetic peptide"
  MOD_RES (7)..(7): Citrulline
  MOD_RES (9)..(9): Citrulline
PLKVISXGXGAKAPGW

SEQ ID NO: 656 - protein, 16 aa, Artificial Sequence
  source: /note="Description of Artificial Sequence: Synthetic peptide"
  MOD_RES (3)..(3): Citrulline
  MOD_RES (5)..(5): Citrulline
ISXGXGAKAPGWLSYS

SEQ ID NO: 657 - protein, 16 aa, Artificial Sequence
  source: /note="Description of Artificial Sequence: Synthetic peptide"
  MOD_RES (10)..(10): Citrulline
LIAGSEAPKXGSILSK

SEQ ID NO: 658 - protein, 16 aa, Artificial Sequence
  source: /note="Description of Artificial Sequence: Synthetic peptide"
  MOD_RES (6)..(6): Citrulline
  MOD_RES (14)..(14): Citrulline
SEAPKXGSILSKPXAG

SEQ ID NO: 659 - protein, 16 aa, Artificial Sequence
  source: /note="Description of Artificial Sequence: Synthetic peptide"
  MOD_RES (2)..(2): Citrulline
  MOD_RES (10)..(10): Citrulline
KXGSILSKPXAGGAGA

SEQ ID NO: 660 - protein, 16 aa, Artificial Sequence
  source: /note="Description of Artificial Sequence: Synthetic peptide"
  MOD_RES (3)..(3): Citrulline
  MOD_RES (10)..(10): Citrulline
KAXSFHGSQXGAELQP

SEQ ID NO: 661 - protein, 16 aa, Artificial Sequence
  source: /note="Description of Artificial Sequence: Synthetic peptide"
  MOD_RES (6)..(6): Citrulline
  MOD_RES (14)..(14): Citrulline
FHGSQXGAELQPSXPT

SEQ ID NO: 662 - protein, 16 aa, Artificial Sequence
  source: /note="Description of Artificial Sequence: Synthetic peptide"
  MOD_RES (11)..(11): Citrulline
DSTSSDSLYPXGIQFK

SEQ ID NO: 663 - protein, 16 aa, Artificial Sequence
  source: /note="Description of Artificial Sequence: Synthetic peptide"
  MOD_RES (7)..(7): Citrulline
  MOD_RES (13)..(13): Citrulline
SDSLYPXGIQFKXPHT

SEQ ID NO: 664 - protein, 16 aa, Artificial Sequence
  source: /note="Description of Artificial Sequence: Synthetic peptide"
  MOD_RES (2)..(2): Citrulline
  MOD_RES (11)..(11): Citrulline
TXLGFGGFLTXGFPKA

SEQ ID NO: 665 - protein, 16 aa, Artificial Sequence
  source: /note="Description of Artificial Sequence: Synthetic peptide"
  MOD_RES (7)..(7): Citrulline
FGGFLTXGFPKAAAPV

SEQ ID NO: 666 - protein, 16 aa, Artificial Sequence
  source: /note="Description of Artificial Sequence: Synthetic peptide"
  MOD_RES (3)..(3): Citrulline
  MOD_RES (13)..(13): Citrulline
LTXGFPKAAAPVXHSG

SEQ ID NO: 667 - protein, 16 aa, Artificial Sequence
  source: /note="Description of Artificial Sequence: Synthetic peptide"
  MOD_RES (10)..(10): Citrulline
AILDYHNQVXGKVFPP

SEQ ID NO: 668 - protein, 16 aa, Artificial Sequence
  source: /note="Description of Artificial Sequence: Synthetic peptide"
  MOD_RES (6)..(6): Citrulline
YHNQVXGKVFPPAANM

SEQ ID NO: 669 - protein, 16 aa, Artificial Sequence
  source: /note="Description of Artificial Sequence: Synthetic peptide"
  MOD_RES (2)..(2): Citrulline
VXGKVFPPAANMEYMV

SEQ ID NO: 670 - protein, 16 aa, Artificial Sequence
  source: /note="Description of Artificial Sequence: Synthetic peptide"
  MOD_RES (1)..(1): Citrulline
  MOD_RES (9)..(9): Citrulline
XPPSNPPAXGTLKTSN

SEQ ID NO: 671 - protein, 16 aa, Artificial Sequence
  source: /note="Description of Artificial Sequence: Synthetic peptide"
  MOD_RES (5)..(5): Citrulline
NPPAXGTLKTSNLPEE

SEQ ID NO: 672 - protein, 16 aa, Artificial Sequence
  source: /note="Description of Artificial Sequence: Synthetic peptide"
  MOD_RES (11)..(11): Citrulline
SFALVNGNNIXGMMKE

SEQ ID NO: 673 - protein, 16 aa, Artificial Sequence
  source: /note="Description of Artificial Sequence: Synthetic peptide"
  MOD_RES (8)..(8): Citrulline
  MOD_RES (15)..(15): Citrulline
MSVVPPNXSQTGWPXG

SEQ ID NO: 674 - protein, 16 aa, Artificial Sequence
  source: /note="Description of Artificial Sequence: Synthetic peptide"
  MOD_RES (4)..(4): Citrulline
  MOD_RES (11)..(11): Citrulline
PPNXSQTGWPXGVTQF

SEQ ID NO: 675 - protein, 16 aa, Artificial Sequence
  source: /note="Description of Artificial Sequence: Synthetic peptide"
  MOD_RES (7)..(7): Citrulline
SQTGWPXGVTQFGNKY

SEQ ID NO: 676 - protein, 16 aa, Artificial Sequence
  source: /note="Description of Artificial Sequence: Synthetic peptide"
  MOD_RES (3)..(3): Citrulline
WPXGVTQFGNKYIQQT

SEQ ID NO: 677 - protein, 16 aa, Artificial Sequence
  source: /note="Description of Artificial Sequence: Synthetic peptide"
  MOD_RES (8)..(8): Citrulline
  MOD_RES (10)..(10): Citrulline
KEDVLEQXGXLQKLVA

SEQ ID NO: 678 - protein, 16 aa, Artificial Sequence
  source: /note="Description of Artificial Sequence: Synthetic peptide"
  MOD_RES (4)..(4): Citrulline
  MOD_RES (6)..(6): Citrulline
LEQXGXLQKLVAKEIQ

SEQ ID NO: 679 - protein, 16 aa, Artificial Sequence
  source: /note="Description of Artificial Sequence: Synthetic peptide"
  MOD_RES (11)..(11): Citrulline
QLGLYPYFGPXGTAHN

SEQ ID NO: 680 - protein, 16 aa, Artificial Sequence
  source: /note="Description of Artificial Sequence: Synthetic peptide"
  MOD_RES (7)..(7): Citrulline
YPYFGPXGTAHNGGIP

SEQ ID NO: 681 - protein, 16 aa, Artificial Sequence
  source: /note="Description of Artificial Sequence: Synthetic peptide"
  MOD_RES (5)..(5): Citrulline
  MOD_RES (12)..(12): Citrulline
AQDEXGLKPPSXGQFP

SEQ ID NO: 682 - protein, 16 aa, Artificial Sequence
  source: /note="Description of Artificial Sequence: Synthetic peptide"
  MOD_RES (1)..(1): Citrulline
  MOD_RES (8)..(8): Citrulline
XGLKPPSXGQFPSLSA

SEQ ID NO: 683 - protein, 16 aa, Artificial Sequence
  source: /note="Description of Artificial Sequence: Synthetic peptide"
  MOD_RES (4)..(4): Citrulline
  MOD_RES (10)..(10): Citrulline
YLMXGYAPNXNKDSKW

SEQ ID NO: 684 - protein, 16 aa, Artificial Sequence
  source: /note="Description of Artificial Sequence: Synthetic peptide"
  MOD_RES (5)..(5): Citrulline
  MOD_RES (10)..(10): Citrulline
IHIFXQVTSXGEAHLE

SEQ ID NO: 685 - protein, 16 aa, Artificial Sequence
  source: /note="Description of Artificial Sequence: Synthetic peptide"
  MOD_RES (1)..(1): Citrulline
  MOD_RES (6)..(6): Citrulline
XQVTSXGEAHLELNAF

SEQ ID NO: 686 - protein, 16 aa, Artificial Sequence
  source: /note="Description of Artificial Sequence: Synthetic peptide"
  MOD_RES (8)..(8): Citrulline
AMYSSDTXGSLPAEHG

SEQ ID NO: 687 - protein, 16 aa, Artificial Sequence
  source: /note="Description of Artificial Sequence: Synthetic peptide"
  MOD_RES (5)..(5): Citrulline
  MOD_RES (8)..(8): Citrulline
SSGAXGMXLKEGANIN

SEQ ID NO: 688 - protein, 16 aa, Artificial Sequence
  source: /note="Description of Artificial Sequence: Synthetic peptide"
  MOD_RES (1)..(1): Citrulline
  MOD_RES (4)..(4): Citrulline
XGMXLKEGANINKSLT

SEQ ID NO: 689 - protein, 16 aa, Artificial Sequence
  source: /note="Description of Artificial Sequence: Synthetic peptide"
  MOD_RES (6)..(6): Citrulline
EEGSVXGALPAVSSPP

SEQ ID NO: 690 - protein, 16 aa, Artificial Sequence
  source: /note="Description of Artificial Sequence: Synthetic peptide"
  MOD_RES (2)..(2): Citrulline
VXGALPAVSSPPAPVS

SEQ ID NO: 691 - protein, 16 aa, Artificial Sequence
  source: /note="Description of Artificial Sequence: Synthetic peptide"
  MOD_RES (5)..(5): Citrulline
  MOD_RES (10)..(10): Citrulline
MHYAXNTFSXGMFLDT

SEQ ID NO: 692 - protein, 16 aa, Artificial Sequence
  source: /note="Description of Artificial Sequence: Synthetic peptide"
  MOD_RES (1)..(1): Citrulline
  MOD_RES (6)..(6): Citrulline
XNTFSXGMFLDTILPS

SEQ ID NO: 693 - protein, 16 aa, Artificial Sequence
  source: /note="Description of Artificial Sequence: Synthetic peptide"
  MOD_RES (2)..(2): Citrulline
  MOD_RES (9)..(9): Citrulline
AXWIQNNTXGDPTLGK

SEQ ID NO: 694 - protein, 16 aa, Artificial Sequence
  source: /note="Description of Artificial Sequence: Synthetic peptide"
  MOD_RES (10)..(10): Citrulline
  MOD_RES (15)..(15): Citrulline
EWEAAAFVAXGSDYXS

SEQ ID NO: 695 - protein, 13 aa, Artificial Sequence
  source: /note="Description of Artificial Sequence: Synthetic peptide"
  MOD_RES (6)..(6): Citrulline
  MOD_RES (11)..(11): Citrulline
AAFVAXGSDYXSI

SEQ ID NO: 696 - protein, 16 aa, Artificial Sequence
  source: /note="Description of Artificial Sequence: Synthetic peptide"
  MOD_RES (10)..(10): Citrulline
KLSLEGSSYXGSLKDP

SEQ ID NO: 697 - protein, 16 aa, Artificial Sequence
  source: /note="Description of Artificial Sequence: Synthetic peptide"
  MOD_RES (6)..(6): Citrulline
EGSSYXGSLKDPAGCL

SEQ ID NO: 698 - protein, 16 aa, Artificial Sequence
  source: /note="Description of Artificial Sequence: Synthetic peptide"
  MOD_RES (2)..(2): Citrulline
YXGSLKDPAGCLNEGM

SEQ ID NO: 699 - protein, 16 aa, Artificial Sequence
  source: /note="Description of Artificial Sequence: Synthetic peptide"
  MOD_RES (3)..(3): Citrulline
  MOD_RES (8)..(8): Citrulline
EVXKLLAXGADINTVN

SEQ ID NO: 700 - protein, 16 aa, Artificial Sequence
  source: /note="Description of Artificial Sequence: Synthetic peptide"
  MOD_RES (4)..(4): Citrulline
LLAXGADINTVNVDGL

SEQ ID NO: 701 - protein, 16 aa, Artificial Sequence
  source: /note="Description of Artificial Sequence: Synthetic peptide"
  MOD_RES (8)..(8): Citrulline
ESGQSSSXGSSHCDSP

SEQ ID NO: 702 - protein, 16 aa, Artificial Sequence
  source: /note="Description of Artificial Sequence: Synthetic peptide"
  MOD_RES (4)..(4): Citrulline
SSSXGSSHCDSPSPQE

SEQ ID NO: 703 - protein, 16 aa, Artificial Sequence
  source: /note="Description of Artificial Sequence: Synthetic peptide"
  MOD_RES (5)..(5): Citrulline
  MOD_RES (10)..(10): Citrulline
AGPSXCGQGXGNLASG

SEQ ID NO: 704 - protein, 16 aa, Artificial Sequence
  source: /note="Description of Artificial Sequence: Synthetic peptide"
  MOD_RES (1)..(1): Citrulline
  MOD_RES (6)..(6): Citrulline
XCGQGXGNLASGGPLW

SEQ ID NO: 705 - protein, 16 aa, Artificial Sequence
  source: /note="Description of Artificial Sequence: Synthetic peptide"
  MOD_RES (8)..(8): Citrulline
DIDGILEXGAKKTAEM

SEQ ID NO: 706 - protein, 16 aa, Artificial Sequence
  source: /note="Description of Artificial Sequence: Synthetic peptide"
  MOD_RES (4)..(4): Citrulline
ILEXGAKKTAEMNEKL

SEQ ID NO: 707 - protein, 16 aa, Artificial Sequence
  source: /note="Description of Artificial Sequence: Synthetic peptide"
  MOD_RES (6)..(6): Citrulline
  MOD_RES (12)..(12): Citrulline
QLEAAXLSCKSXGAHL

SEQ ID NO: 708 - protein, 16 aa, Artificial Sequence
  source: /note="Description of Artificial Sequence: Synthetic peptide"
  MOD_RES (2)..(2): Citrulline
  MOD_RES (8)..(8): Citrulline
AXLSCKSXGAHLASAD

SEQ ID NO: 709 - protein, 16 aa, Artificial Sequence
  source: /note="Description of Artificial Sequence: Synthetic peptide"
  MOD_RES (5)..(5): Citrulline
AEILXGDKFIPKFKGD

SEQ ID NO: 710 - protein, 16 aa, Artificial Sequence
  source: /note="Description of Artificial Sequence: Synthetic peptide"
  MOD_RES (13)..(13): Citrulline
SPSLQSETVHYKXGVS

SEQ ID NO: 711 - protein, 16 aa, Artificial Sequence
  source: /note="Description of Artificial Sequence: Synthetic peptide"
  MOD_RES (9)..(9): Citrulline
QSETVHYKXGVSQQFS

SEQ ID NO: 712 - protein, 16 aa, Artificial Sequence
  source: /note="Description of Artificial Sequence: Synthetic peptide"
  MOD_RES (2)..(2): Citrulline
  MOD_RES (8)..(8): Citrulline
TXELITLXGSILEDAT

SEQ ID NO: 713 - protein, 16 aa, Artificial Sequence
  source: /note="Description of Artificial Sequence: Synthetic peptide"
  MOD_RES (4)..(4): Citrulline
ITLXGSILEDATPTAT

SEQ ID NO: 714 - protein, 16 aa, Artificial Sequence
  source: /note="Description of Artificial Sequence: Synthetic peptide"
  MOD_RES (10)..(10): Citrulline
PTATKHGTGXGLPLKD

SEQ ID NO: 715 - protein, 16 aa, Artificial Sequence
  source: /note="Description of Artificial Sequence: Synthetic peptide"
  MOD_RES (6)..(6): Citrulline
KHGTGXGLPLKDALEY

SEQ ID NO: 716 - protein, 16 aa, Artificial Sequence
  source: /note="Description of Artificial Sequence: Synthetic peptide"
  MOD_RES (2)..(2): Citrulline
GXGLPLKDALEYVIPE

SEQ ID NO: 717 - protein, 16 aa, Artificial Sequence
  source: /note="Description of Artificial Sequence: Synthetic peptide"
  MOD_RES (5)..(5): Citrulline
  MOD_RES (10)..(10): Citrulline
CHYLXLFSKXGTKDEV

SEQ ID NO: 718 - protein, 16 aa, Artificial Sequence
  source: /note="Description of Artificial Sequence: Synthetic peptide"
  MOD_RES (1)..(1): Citrulline
  MOD_RES (6)..(6): Citrulline
XLFSKXGTKDEVQEMC

SEQ ID NO: 719 - protein, 16 aa, Artificial Sequence
  source: /note="Description of Artificial Sequence: Synthetic peptide"
  MOD_RES (12)..(12): Citrulline
GGGSQGSFPGPXGSGS

SEQ ID NO: 720 - protein, 16 aa, Artificial Sequence
  source: /note="Description of Artificial Sequence: Synthetic peptide"
  MOD_RES (8)..(8): Citrulline
  MOD_RES (16)..(16): Citrulline
QGSFPGPXGSGSGASX

SEQ ID NO: 721 - protein, 16 aa, Artificial Sequence
  source: /note="Description of Artificial Sequence: Synthetic peptide"
  MOD_RES (12)..(12): Citrulline
WNYNKSPEDTYXGAKI

SEQ ID NO: 722 - protein, 16 aa, Artificial Sequence
  source: /note="Description of Artificial Sequence: Synthetic peptide"
  MOD_RES (8)..(8): Citrulline
KSPEDTYXGAKIVHVS

SEQ ID NO: 723 - protein, 16 aa, Artificial Sequence
  source: /note="Description of Artificial Sequence: Synthetic peptide"
  MOD_RES (6)..(6): Citrulline
  MOD_RES (13)..(13): Citrulline
EEVVPXGGSVSQXGSI

SEQ ID NO: 724 - protein, 16 aa, Artificial Sequence
  source: /note="Description of Artificial Sequence: Synthetic peptide"
  MOD_RES (2)..(2): Citrulline
  MOD_RES (9)..(9): Citrulline
PXGGSVSQXGSIGSHQ

SEQ ID NO: 725 - protein, 16 aa, Artificial Sequence
  source: /note="Description of Artificial Sequence: Synthetic peptide"
  MOD_RES (7)..(7): Citrulline
IQGGAAXGEAIESDDT

SEQ ID NO: 726 - protein, 16 aa, Artificial Sequence
  source: /note="Description of Artificial Sequence: Synthetic peptide"
  MOD_RES (3)..(3): Citrulline
AAXGEAIESDDTMGGI

SEQ ID NO: 727 - protein, 16 aa, Artificial Sequence
  source: /note="Description of Artificial Sequence: Synthetic peptide"
  MOD_RES (1)..(1): Citrulline
  MOD_RES (5)..(5): Citrulline
XELTXGQKAGEKPLAA

SEQ ID NO: 728 - protein, 16 aa, Artificial Sequence
  source: /note="Description of Artificial Sequence: Synthetic peptide"
  MOD_RES (8)..(8): Citrulline
QESLLDSXGHLKGNNP

SEQ ID NO: 729 - protein, 16 aa, Artificial Sequence
  source: /note="Description of Artificial Sequence: Synthetic peptide"
  MOD_RES (12)..(12): Citrulline
GGYTINDKPNPXGEIV

SEQ ID NO: 730 - protein, 16 aa, Artificial Sequence
  source: /note="Description of Artificial Sequence: Synthetic peptide"
  MOD_RES (8)..(8): Citrulline
INDKPNPXGEIVIGGQ

SEQ ID NO: 731 - protein, 16 aa, Artificial Sequence
  source: /note="Description of Artificial Sequence: Synthetic peptide"
  MOD_RES (4)..(4): Citrulline
PNPXGEIVIGGQNISM

SEQ ID NO: 732 - protein, 16 aa, Artificial Sequence
  source: /note="Description of Artificial Sequence: Synthetic peptide"
  MOD_RES (11)..(11): Citrulline
SGCGGTLYGDXGSFTS

SEQ ID NO: 733 - protein, 16 aa, Artificial Sequence
  source: /note="Description of Artificial Sequence: Synthetic peptide"
  MOD_RES (7)..(7): Citrulline
GTLYGDXGSFTSPGYP

SEQ ID NO: 734 - protein, 16 aa, Artificial Sequence
  source: /note="Description of Artificial Sequence: Synthetic peptide"
  MOD_RES (11)..(11): Citrulline
MSLEDPFFVVXGEVQK

SEQ ID NO: 735 - protein, 16 aa, Artificial Sequence
  source: /note="Description of Artificial Sequence: Synthetic peptide"
  MOD_RES (7)..(7): Citrulline
DPFFVVXGEVQKAVNT

SEQ ID NO: 736 - protein, 16 aa, Artificial Sequence
  source: /note="Description of Artificial Sequence: Synthetic peptide"
  MOD_RES (3)..(3): Citrulline
  MOD_RES (14)..(14): Citrulline
VVXGEVQKAVNTAXGL

SEQ ID NO: 737 - protein, 16 aa, Artificial Sequence
  source: /note="Description of Artificial Sequence: Synthetic peptide"
  MOD_RES (10)..(10): Citrulline
IGDQEPWAFXGGLAGE

SEQ ID NO: 738 - protein, 16 aa, Artificial Sequence
  source: /note="Description of Artificial Sequence: Synthetic peptide"
  MOD_RES (6)..(6): Citrulline
  MOD_RES (15)..(15): Citrulline
EPWAFXGGLAGEFQXL

SEQ ID NO: 739 - protein, 16 aa, Artificial Sequence
  source: /note="Description of Artificial Sequence: Synthetic peptide"
  MOD_RES (10)..(10): Citrulline
SKMGYDFDYXGTVNVK

SEQ ID NO: 740 - protein, 16 aa, Artificial Sequence
  source: /note="Description of Artificial Sequence: Synthetic peptide"
  MOD_RES (11)..(11): Citrulline
PEYYVGPPLQXGDMIC

SEQ ID NO: 741 - protein, 16 aa, Artificial Sequence
  source: /note="Description of Artificial Sequence: Synthetic peptide"
  MOD_RES (7)..(7): Citrulline
VGPPLQXGDMICAVFP

SEQ ID NO: 742 - protein, 16 aa, Artificial Sequence
  source: /note="Description of Artificial Sequence: Synthetic peptide"
  MOD_RES (11)..(11): Citrulline
NYLCDSPSHVXGQQVQ

SEQ ID NO: 743 - protein, 16 aa, Artificial Sequence
  source: /note="Description of Artificial Sequence: Synthetic peptide"
  MOD_RES (7)..(7): Citrulline
  MOD_RES (15)..(15): Citrulline
DSPSHVXGQQVQDVXL

SEQ ID NO: 744 - protein, 16 aa, Artificial Sequence
  source: /note="Description of Artificial Sequence: Synthetic peptide"
  MOD_RES (5)..(5): Citrulline
  MOD_RES (13)..(13): Citrulline
PKLFXGLQIKYVXGSD

SEQ ID NO: 745 - protein, 16 aa, Artificial Sequence
  source: /note="Description of Artificial Sequence: Synthetic peptide"
  MOD_RES (1)..(1): Citrulline
  MOD_RES (9)..(9): Citrulline
XGLQIKYVXGSDPVLK

SEQ ID NO: 746 - protein, 16 aa, Artificial Sequence
  source: /note="Description of Artificial Sequence: Synthetic peptide"
  MOD_RES (5)..(5): Citrulline
IKYVXGSDPVLKLLDD

SEQ ID NO: 747 - protein, 16 aa, Artificial Sequence
  source: /note="Description of Artificial Sequence: Synthetic peptide"
  MOD_RES (12)..(12): Citrulline
  MOD_RES (14)..(14): Citrulline
LPQGQKTAALPXTXGA

SEQ ID NO: 748 - protein, 16 aa, Artificial Sequence
  source: /note="Description of Artificial Sequence: Synthetic peptide"
  MOD_RES (8)..(8): Citrulline
  MOD_RES (10)..(10): Citrulline
QKTAALPXTXGAGLLE

SEQ ID NO: 749 - protein, 16 aa, Artificial Sequence
  source: /note="Description of Artificial Sequence: Synthetic peptide"
  MOD_RES (10)..(10): Citrulline
IASASEYAHXGLDKLE

SEQ ID NO: 750 - protein, 16 aa, Artificial Sequence
  source: /note="Description of Artificial Sequence: Synthetic peptide"
  MOD_RES (6)..(6): Citrulline
SEYAHXGLDKLEENLP

SEQ ID NO: 751 - protein, 16 aa, Artificial Sequence
  source: /note="Description of Artificial Sequence: Synthetic peptide"
  MOD_RES (7)..(7): Citrulline
EAVDATXGAVQSGVDK

SEQ ID NO: 752 - protein, 16 aa, Artificial Sequence
  source: /note="Description of Artificial Sequence: Synthetic peptide"
  MOD_RES (10)..(10): Citrulline
LASDLTKTTXGAFENK

SEQ ID NO: 753 - protein, 16 aa, Artificial Sequence
  source: /note="Description of Artificial Sequence: Synthetic peptide"
  MOD_RES (6)..(6): Citrulline
LTKTTXGAFENKTPTD

SEQ ID NO: 754 - protein, 16 aa, Artificial Sequence
  source: /note="Description of Artificial Sequence: Synthetic peptide"
  MOD_RES (2)..(2): Citrulline
TXGAFENKTPTDGFID

SEQ ID NO: 755 - protein, 16 aa, Artificial Sequence
  source: /note="Description of Artificial Sequence: Synthetic peptide"
  MOD_RES (13)..(13): Citrulline
SPIKQIAWEQKQXGFI

SEQ ID NO: 756 - protein, 16 aa, Artificial Sequence
  source: /note="Description of Artificial Sequence: Synthetic peptide"
  MOD_RES (9)..(9): Citrulline
QIAWEQKQXGFILDMS

SEQ ID NO: 757 - protein, 16 aa, Artificial Sequence
  source: /note="Description of Artificial Sequence: Synthetic peptide"
  MOD_RES (5)..(5): Citrulline
EQKQXGFILDMSNFKP

SEQ ID NO: 758 - protein, 16 aa, Artificial Sequence
  source: /note="Description of Artificial Sequence: Synthetic peptide"
  MOD_RES (7)..(7): Citrulline
  MOD_RES (9)..(9): Citrulline
VDHYVSXVXGNLQMLE

SEQ ID NO: 759 - protein, 16 aa, Artificial Sequence
  source: /note="Description of Artificial Sequence: Synthetic peptide"
  MOD_RES (3)..(3): Citrulline
  MOD_RES (5)..(5): Citrulline
VSXVXGNLQMLEQLDL

SEQ ID NO: 760 - protein, 16 aa, Artificial Sequence
  source: /note="Description of Artificial Sequence: Synthetic peptide"
  MOD_RES (9)..(9): Citrulline
  MOD_RES (14)..(14): Citrulline
IQFLHVLTXGSQYXVE

SEQ ID NO: 761 - protein, 16 aa, Artificial Sequence
  source: /note="Description of Artificial Sequence: Synthetic peptide"
  MOD_RES (5)..(5): Citrulline
  MOD_RES (10)..(10): Citrulline
HVLTXGSQYXVESMML

SEQ ID NO: 762 - protein, 16 aa, Artificial Sequence
  source: /note="Description of Artificial Sequence: Synthetic peptide"
  MOD_RES (8)..(8): Citrulline
NGGIQWSXGKHKESET

SEQ ID NO: 763 - protein, 16 aa, Artificial Sequence
  source: /note="Description of Artificial Sequence: Synthetic peptide"
  MOD_RES (4)..(4): Citrulline
QWSXGKHKESETLTEQ

SEQ ID NO: 764 - protein, 16 aa, Artificial Sequence
  source: /note="Description of Artificial Sequence: Synthetic peptide"
  MOD_RES (7)..(7): Citrulline
  MOD_RES (11)..(11): Citrulline
ALQTFAXTVAXGPVAP

SEQ ID NO: 765 - protein, 16 aa, Artificial Sequence
  source: /note="Description of Artificial Sequence: Synthetic peptide"
  MOD_RES (3)..(3): Citrulline
  MOD_RES (7)..(7): Citrulline
FAXTVAXGPVAPSKVA

SEQ ID NO: 766 - protein, 16 aa, Artificial Sequence
  source: /note="Description of Artificial Sequence: Synthetic peptide"
  MOD_RES (7)..(7): Citrulline
KDEWFSXGKKPIEDPA

SEQ ID NO: 767 - protein, 16 aa, Artificial Sequence
  source: /note="Description of Artificial Sequence: Synthetic peptide"
  MOD_RES (3)..(3): Citrulline
FSXGKKPIEDPANDTV

SEQ ID NO: 768 - protein, 16 aa, Artificial Sequence
  source: /note="Description of Artificial Sequence: Synthetic peptide"
  MOD_RES (7)..(7): Citrulline
KYTPTPXGEMKSYSPT

SEQ ID NO: 769 - protein, 16 aa, Artificial Sequence
  source: /note="Description of Artificial Sequence: Synthetic peptide"
  MOD_RES (6)..(6): Citrulline
  MOD_RES (11)..(11): Citrulline
SMAYMXGMYFXMKDEV

SEQ ID NO: 770 - protein, 16 aa, Artificial Sequence
  source: /note="Description of Artificial Sequence: Synthetic peptide"
  MOD_RES (6)..(6): Citrulline
  MOD_RES (9)..(9): Citrulline
KDEVFXGSXPYESGPL

SEQ ID NO: 771 - protein, 16 aa, Artificial Sequence
  source: /note="Description of Artificial Sequence: Synthetic peptide"
  MOD_RES (2)..(2): Citrulline
  MOD_RES (5)..(5): Citrulline
FXGSXPYESGPLEEFL

SEQ ID NO: 772 - protein, 16 aa, Artificial Sequence
  source: /note="Description of Artificial Sequence: Synthetic peptide"
  MOD_RES (11)..(11): Citrulline
  MOD_RES (16)..(16): Citrulline
YQTCVSEDSSXGAFSX

SEQ ID NO: 773 - protein, 16 aa, Artificial Sequence
  source: /note="Description of Artificial Sequence: Synthetic peptide"
  MOD_RES (7)..(7): Citrulline
  MOD_RES (12)..(12): Citrulline
VSEDSSXGAFSXQTST

SEQ ID NO: 774 - protein, 16 aa, Artificial Sequence
  source: /note="Description of Artificial Sequence: Synthetic peptide"
  MOD_RES (3)..(3): Citrulline
  MOD_RES (8)..(8): Citrulline
SSXGAFSXQTSTDDEC

SEQ ID NO: 775 - protein, 16 aa, Artificial Sequence
  source: /note="Description of Artificial Sequence: Synthetic peptide"
  MOD_RES (9)..(9): Citrulline
EFDMFALTXGSSLADQ

SEQ ID NO: 776 - protein, 16 aa, Artificial Sequence
  source: /note="Description of Artificial Sequence: Synthetic peptide"
  MOD_RES (5)..(5): Citrulline
  MOD_RES (13)..(13): Citrulline
FALTXGSSLADQXKEV

SEQ ID NO: 777 - protein, 16 aa, Artificial Sequence
  source: /note="Description of Artificial Sequence: Synthetic peptide"
  MOD_RES (13)..(13): Citrulline
LGKIGGDSGLSVXGKQ

SEQ ID NO: 778 - protein, 16 aa, Artificial Sequence
  source: /note="Description of Artificial Sequence: Synthetic peptide"
  MOD_RES (9)..(9): Citrulline
GGDSGLSVXGKQFAQA

SEQ ID NO: 779 - protein, 16 aa, Artificial Sequence
  source: /note="Description of Artificial Sequence: Synthetic peptide"
  MOD_RES (10)..(10): Citrulline
DPSSYSDAPXGTWSTG

SEQ ID NO: 780 - protein, 16 aa, Artificial Sequence
  source: /note="Description of Artificial Sequence: Synthetic peptide"
  MOD_RES (6)..(6): Citrulline
  MOD_RES (16)..(16): Citrulline
YSDAPXGTWSTGLPKX

SEQ ID NO: 781 - protein, 16 aa, Artificial Sequence
  source: /note="Description of Artificial Sequence: Synthetic peptide"
  MOD_RES (8)..(9): Citrulline
MVSQPSAXXGSGISVS

SEQ ID NO: 782 - protein, 16 aa, Artificial Sequence
  source: /note="Description of Artificial Sequence: Synthetic peptide"
  MOD_RES (4)..(5): Citrulline
PSAXXGSGISVSLPVG

SEQ ID NO: 783 - protein, 16 aa, Artificial Sequence
  source: /note="Description of Artificial Sequence: Synthetic peptide"
  MOD_RES (14)..(14): Citrulline
NGDHGDSYPFDGPXGT

SEQ ID NO: 784 - protein, 16 aa, Artificial Sequence
  source: /note="Description of Artificial Sequence: Synthetic peptide"
  MOD_RES (10)..(10): Citrulline
GDSYPFDGPXGTLAHA

SEQ ID NO: 785 - protein, 16 aa, Artificial Sequence
  source: /note="Description of Artificial Sequence: Synthetic peptide"
  MOD_RES (11)..(11): Citrulline
GSHFINTSSPXGEAKM

SEQ ID NO: 786 - protein, 16 aa, Artificial Sequence
  source: /note="Description of Artificial Sequence: Synthetic peptide"
  MOD_RES (7)..(7): Citrulline
INTSSPXGEAKMSITS

SEQ ID NO: 787 - protein, 16 aa, Artificial Sequence
  source: /note="Description of Artificial Sequence: Synthetic peptide"
  MOD_RES (9)..(9): Citrulline
IFEVCWNAXGDKVGAS

SEQ ID NO: 788 - protein, 16 aa, Artificial Sequence
  source: /note="Description of Artificial Sequence: Synthetic peptide"
  MOD_RES (5)..(5): Citrulline
CWNAXGDKVGASASDG

SEQ ID NO: 789 - protein, 16 aa, Artificial Sequence
  source: /note="Description of Artificial Sequence: Synthetic peptide"
  MOD_RES (13)..(13): Citrulline
IMLHHCFASLLTXGSK

SEQ ID NO: 790 - protein, 16 aa, Artificial Sequence
  source: /note="Description of Artificial Sequence: Synthetic peptide"
  MOD_RES (9)..(9): Citrulline
HCFASLLTXGSKGEYQ

SEQ ID NO: 791 - protein, 16 aa, Artificial Sequence
  source: /note="Description of Artificial Sequence: Synthetic peptide"
  MOD_RES (5)..(5): Citrulline
SLLTXGSKGEYQIKME

SEQ ID NO: 792 - protein, 16 aa, Artificial Sequence
  source: /note="Description of Artificial Sequence: Synthetic peptide"
  MOD_RES (9)..(9): Citrulline
GYDTQVGEXGLKLSGG

SEQ ID NO: 793 - protein, 16 aa, Artificial Sequence
  source: /note="Description of Artificial Sequence: Synthetic peptide"
  MOD_RES (5)..(5): Citrulline
  MOD_RES (16)..(16): Citrulline
QVGEXGLKLSGGEKQX

SEQ ID NO: 794 - protein, 16 aa, Artificial Sequence
  source: /note="Description of Artificial Sequence: Synthetic peptide"
  MOD_RES (9)..(9): Citrulline
ETLFSTVHXGSALPLA

SEQ ID NO: 795 - protein, 16 aa, Artificial Sequence
  source: /note="Description of Artificial Sequence: Synthetic peptide"
  MOD_RES (5)..(5): Citrulline
STVHXGSALPLAIKYM

SEQ ID NO: 796 - protein, 16 aa, Artificial Sequence
  source: /note="Description of Artificial Sequence: Synthetic peptide"
  MOD_RES (11)..(11): Citrulline
LPGNDVLEFSXGVTDL

SEQ ID NO: 797 - protein, 16 aa, Artificial Sequence
  source: /note="Description of Artificial Sequence: Synthetic peptide"
  MOD_RES (7)..(7): Citrulline
DVLEFSXGVTDLDAVG

SEQ ID NO: 798 - protein, 16 aa, Artificial Sequence
  source: /note="Description of Artificial Sequence: Synthetic peptide"
  MOD_RES (7)..(7): Citrulline
  MOD_RES (10)..(10): Citrulline
NSEFAHXEAXGQLKVA

SEQ ID NO: 799 - protein, 16 aa, Artificial Sequence
  source: /note="Description of Artificial Sequence: Synthetic peptide"
  MOD_RES (3)..(3): Citrulline
  MOD_RES (6)..(6): Citrulline
AHXEAXGQLKVAKESD

SEQ ID NO: 800 - protein, 16 aa, Artificial Sequence
  source: /note="Description of Artificial Sequence: Synthetic peptide"
  MOD_RES (2)..(2): Citrulline
  MOD_RES (7)..(7): Citrulline
SXPSIKXGASLHSSSG

SEQ ID NO: 801 - protein, 16 aa, Artificial Sequence
  source: /note="Description of Artificial Sequence: Synthetic peptide"
  MOD_RES (3)..(3): Citrulline
IKXGASLHSSSGGGSS

SEQ ID NO: 802 - protein, 16 aa, Artificial Sequence
  source: /note="Description of Artificial Sequence: Synthetic peptide"
  MOD_RES (1)..(1): Citrulline
  MOD_RES (6)..(6): Citrulline
XLSYIXGKLGQASCQA

SEQ ID NO: 803 - protein, 16 aa, Artificial Sequence
  source: /note="Description of Artificial Sequence: Synthetic peptide"
  MOD_RES (10)..(10): Citrulline
  MOD_RES (12)..(12): Citrulline
LSYFGGVCSXTXGVGV

SEQ ID NO: 804 - protein, 16 aa, Artificial Sequence
  source: /note="Description of Artificial Sequence: Synthetic peptide"
  MOD_RES (6)..(6): Citrulline
  MOD_RES (8)..(8): Citrulline
GGVCSXTXGVGVNEYG

SEQ ID NO: 805 - protein, 16 aa, Artificial Sequence
  source: /note="Description of Artificial Sequence: Synthetic peptide"
  MOD_RES (2)..(2): Citrulline
  MOD_RES (4)..(4): Citrulline
SXTXGVGVNEYGLPMA

SEQ ID NO: 806 - protein, 16 aa, Artificial Sequence
  source: /note="Description of Artificial Sequence: Synthetic peptide"
  MOD_RES (6)..(6): Citrulline
  MOD_RES (10)..(10): Citrulline
IQAIPXKAFXGATDLK

SEQ ID NO: 807 - protein, 16 aa, Artificial Sequence
  source: /note="Description of Artificial Sequence: Synthetic peptide"
  MOD_RES (2)..(2): Citrulline
  MOD_RES (6)..(6): Citrulline
PXKAFXGATDLKNLQL

SEQ ID NO: 808 - protein, 16 aa, Artificial Sequence
  source: /note="Description of Artificial Sequence: Synthetic peptide"
  MOD_RES (2)..(2): Citrulline
FXGATDLKNLQLDKNQ

SEQ ID NO: 809 - protein, 16 aa, Artificial Sequence
  source: /note="Description of Artificial Sequence: Synthetic peptide"
  MOD_RES (7)..(7): Citrulline
MYQMSLXGKASGVGLP

SEQ ID NO: 810 - protein, 16 aa, Artificial Sequence
  source: /note="Description of Artificial Sequence: Synthetic peptide"
  MOD_RES (3)..(3): Citrulline
SLXGKASGVGLPGGSL

SEQ ID NO: 811 - protein, 16 aa, Artificial Sequence
  source: /note="Description of Artificial Sequence: Synthetic peptide"
  MOD_RES (13)..(13): Citrulline
YTPAGPQVPPLAXGTV

SEQ ID NO: 812 - protein, 16 aa, Artificial Sequence
  source: /note="Description of Artificial Sequence: Synthetic peptide"
  MOD_RES (9)..(9): Citrulline
  MOD_RES (14)..(14): Citrulline
GPQVPPLAXGTVQXAE

SEQ ID NO: 813 - protein, 16 aa, Artificial Sequence
  source: /note="Description of Artificial Sequence: Synthetic peptide"
  MOD_RES (13)..(13): Citrulline
ASPSPKEVNFVSXGAS

SEQ ID NO: 814 - protein, 16 aa, Artificial Sequence
  source: /note="Description of Artificial Sequence: Synthetic peptide"
  MOD_RES (9)..(9): Citrulline
PKEVNFVSXGASSHQP

SEQ ID NO: 815 - protein, 16 aa, Artificial Sequence
  source: /note="Description of Artificial Sequence: Synthetic peptide"
  MOD_RES (5)..(5): Citrulline
  MOD_RES (13)..(13): Citrulline
NFVSXGASSHQPXVPL

SEQ ID NO: 816 - protein, 16 aa, Artificial Sequence
  source: /note="Description of Artificial Sequence: Synthetic peptide"
  MOD_RES (8)..(8): Citrulline
DVVKVIGXGAFGEVQL

SEQ ID NO: 817 - protein, 16 aa, Artificial Sequence
  source: /note="Description of Artificial Sequence: Synthetic peptide"
  MOD_RES (11)..(11): Citrulline
  MOD_RES (16)..(16): Citrulline
ELTFKDQYIGXGDMWX

SEQ ID NO: 818 - protein, 16 aa, Artificial Sequence
  source: /note="Description of Artificial Sequence: Synthetic peptide"
  MOD_RES (10)..(11): Citrulline
VMPTISEDGXXGSALG

SEQ ID NO: 819 - protein, 16 aa, Artificial Sequence
  source: /note="Description of Artificial Sequence: Synthetic peptide"
  MOD_RES (6)..(7): Citrulline
ISEDGXXGSALGPDEA

SEQ ID NO: 820 - protein, 16 aa, Artificial Sequence
  source: /note="Description of Artificial Sequence: Synthetic peptide"
  MOD_RES (9)..(9): Citrulline
DHLNKKELXGQLKMVD

SEQ ID NO: 821 - protein, 16 aa, Artificial Sequence
  source: /note="Description of Artificial Sequence: Synthetic peptide"
  MOD_RES (11)..(11): Citrulline
VHSDFTAAATXGAMAV

SEQ ID NO: 822 - protein, 16 aa, Artificial Sequence
  source: /note="Description of Artificial Sequence: Synthetic peptide"
  MOD_RES (7)..(7): Citrulline
FTAAATXGAMAVIDGN

SEQ ID NO: 823 - protein, 16 aa, Artificial Sequence
  source: /note="Description of Artificial Sequence: Synthetic peptide"
  MOD_RES (3)..(3): Citrulline
ATXGAMAVIDGNVMAI

SEQ ID NO: 824 - protein, 16 aa, Artificial Sequence
  source: /note="Description of Artificial Sequence: Synthetic peptide"
  MOD_RES (9)..(9): Citrulline
  MOD_RES (13)..(13): Citrulline
PGPSAPPPXSGPXGQL

SEQ ID NO: 825 - protein, 16 aa, Artificial Sequence
  source: /note="Description of Artificial Sequence: Synthetic peptide"
  MOD_RES (5)..(5): Citrulline
  MOD_RES (9)..(9): Citrulline
APPPXSGPXGQLASPD

SEQ ID NO: 826 - protein, 16 aa, Artificial Sequence
  source: /note="Description of Artificial Sequence: Synthetic peptide"
  MOD_RES (1)..(1): Citrulline
  MOD_RES (5)..(5): Citrulline
XSGPXGQLASPDAPGP

SEQ ID NO: 827 - protein, 16 aa, Artificial Sequence
  source: /note="Description of Artificial Sequence: Synthetic peptide"
  MOD_RES (5)..(5): Citrulline
  MOD_RES (7)..(7): Citrulline
SSSHXAXGEVDVFSPF

SEQ ID NO: 828 - protein, 16 aa, Artificial Sequence
  source: /note="Description of Artificial Sequence: Synthetic peptide"
  MOD_RES (1)..(1): Citrulline
  MOD_RES (3)..(3): Citrulline
XAXGEVDVFSPFPAPT

SEQ ID NO: 829 - protein, 16 aa, Artificial Sequence
  source: /note="Description of Artificial Sequence: Synthetic peptide"
  MOD_RES (5)..(6): Citrulline
EELIXXGVLKELPDQD

SEQ ID NO: 830 - protein, 16 aa, Artificial Sequence
  source: /note="Description of Artificial Sequence: Synthetic peptide"
  MOD_RES (1)..(2): Citrulline
XXGVLKELPDQDGDVT

SEQ ID NO: 831 - protein, 16 aa, Artificial Sequence
  source: /note="Description of Artificial Sequence: Synthetic peptide"
  MOD_RES (9)..(9): Citrulline
ELAALLIEXGASLEEV

SEQ ID NO: 832 - protein, 16 aa, Artificial Sequence
  source: /note="Description of Artificial Sequence: Synthetic peptide"
  MOD_RES (5)..(5): Citrulline
LLIEXGASLEEVNDEG

SEQ ID NO: 833 - protein, 16 aa, Artificial Sequence
  source: /note="Description of Artificial Sequence: Synthetic peptide"
  MOD_RES (9)..(9): Citrulline
  MOD_RES (16)..(16): Citrulline
ELVQTLLEXGASIEHX

SEQ ID NO: 834 - protein, 16 aa, Artificial Sequence
  source: /note="Description of Artificial Sequence: Synthetic peptide"
  MOD_RES (5)..(5): Citrulline
  MOD_RES (12)..(12): Citrulline
TLLEXGASIEHXDKKG

SEQ ID NO: 835 - protein, 16 aa, Artificial Sequence
  source: /note="Description of Artificial Sequence: Synthetic peptide"
  MOD_RES (2)..(2): Citrulline
  MOD_RES (11)..(11): Citrulline
AXAVAPKPSSXGEYVV

SEQ ID NO: 836 - protein, 16 aa, Artificial Sequence
  source: /note="Description of Artificial Sequence: Synthetic peptide"
  MOD_RES (7)..(7): Citrulline
APKPSSXGEYVVAKLD

SEQ ID NO: 837 - protein, 16 aa, Artificial Sequence
  source: /note="Description of Artificial Sequence: Synthetic peptide"
  MOD_RES (12)..(12): Citrulline
YECKECGKGFNXGAHL

SEQ ID NO: 838 - protein, 16 aa, Artificial Sequence
  source: /note="Description of Artificial Sequence: Synthetic peptide"
  MOD_RES (8)..(8): Citrulline
ECGKGFNXGAHLIQHQ

SEQ ID NO: 839 - protein, 16 aa, Artificial Sequence
  source: /note="Description of Artificial Sequence: Synthetic peptide"
  MOD_RES (12)..(12): Citrulline
FECQDCGKAFNXGSSL

SEQ ID NO: 840 - protein, 16 aa, Artificial Sequence
  source: /note="Description of Artificial Sequence: Synthetic peptide"
  MOD_RES (8)..(8): Citrulline
DCGKAFNXGSSLVQHQ

SEQ ID NO: 841 - protein, 16 aa, Artificial Sequence
  source: /note="Description of Artificial Sequence: Synthetic peptide"
  MOD_RES (10)..(10): Citrulline
CDPHIGLLHXGTEKLI

SEQ ID NO: 842 - protein, 16 aa, Artificial Sequence
  source: /note="Description of Artificial Sequence: Synthetic peptide"
  MOD_RES (6)..(6): Citrulline
IGLLHXGTEKLIEYKT

SEQ ID NO: 843 - protein, 16 aa, Artificial Sequence
  source: /note="Description of Artificial Sequence: Synthetic peptide"
  MOD_RES (6)..(6): Citrulline
  MOD_RES (8)..(8): Citrulline
NLKQLXKXGSIPTSLT

SEQ ID NO: 844 - protein, 16 aa, Artificial Sequence
  source: /note="Description of Artificial Sequence: Synthetic peptide"
  MOD_RES (2)..(2): Citrulline
  MOD_RES (4)..(4): Citrulline
LXKXGSIPTSLTALSL

SEQ ID NO: 845 - protein, 16 aa, Artificial Sequence
  source: /note="Description of Artificial Sequence: Synthetic peptide"
  MOD_RES (6)..(6): Citrulline
  MOD_RES (9)..(9): Citrulline
NAPSFXVEXGADGKMF

SEQ ID NO: 846 - protein, 16 aa, Artificial Sequence
  source: /note="Description of Artificial Sequence: Synthetic peptide"
  MOD_RES (2)..(2): Citrulline
  MOD_RES (5)..(5): Citrulline
FXVEXGADGKMFLHYY

SEQ ID NO: 847 - protein, 16 aa, Artificial Sequence
  source: /note="Description of Artificial Sequence: Synthetic peptide"
  MOD_RES (8)..(8): Citrulline
THKKIHTXGKPYNCEE

SEQ ID NO: 848 - protein, 16 aa, Artificial Sequence
  source: /note="Description of Artificial Sequence: Synthetic peptide"
  MOD_RES (4)..(4): Citrulline
IHTXGKPYNCEECGKS

SEQ ID NO: 849 - protein, 16 aa, Artificial Sequence
  source: /note="Description of Artificial Sequence: Synthetic peptide"
  MOD_RES (12)..(12): Citrulline
QSYFKSQPFDFXGAQI

SEQ ID NO: 850 - protein, 16 aa, Artificial Sequence
  source: /note="Description of Artificial Sequence: Synthetic peptide"
  MOD_RES (8)..(8): Citrulline
KSQPFDFXGAQIISGQ

SEQ ID NO: 851 - protein, 16 aa, Artificial Sequence
  source: /note="Description of Artificial Sequence: Synthetic peptide"
  MOD_RES (4)..(4): Citrulline
FDFXGAQIISGQEEGV

SEQ ID NO: 852 - protein, 16 aa, Artificial Sequence
  source: /note="Description of Artificial Sequence: Synthetic peptide"
  MOD_RES (13)..(14): Citrulline
VALDVDQPGANYXXGY

SEQ ID NO: 853 - protein, 16 aa, Artificial Sequence
  source: /note="Description of Artificial Sequence: Synthetic peptide"
  MOD_RES (9)..(10): Citrulline
VDQPGANYXXGYDLPK

SEQ ID NO: 854 - protein, 16 aa, Artificial Sequence
  source: /note="Description of Artificial Sequence: Synthetic peptide"
  MOD_RES (5)..(6): Citrulline
GANYXXGYDLPKYHMV

SEQ ID NO: 855 - protein, 16 aa, Artificial Sequence
  source: /note="Description of Artificial Sequence: Synthetic peptide"
  MOD_RES (10)..(10): Citrulline
KPNVFTVVTXGAGIGG

SEQ ID NO: 856 - protein, 16 aa, Artificial Sequence
  source: /note="Description of Artificial Sequence: Synthetic peptide"
  MOD_RES (6)..(6): Citrulline
FTVVTXGAGIGGLGIT

SEQ ID NO: 857 - protein, 16 aa, Artificial Sequence
  source: /note="Description of Artificial Sequence: Synthetic peptide"
  MOD_RES (1)..(1): Citrulline
  MOD_RES (14)..(14): Citrulline
XGTAGAIQEGSITXGT

SEQ ID NO: 858 - protein, 16 aa, Artificial Sequence
  source: /note="Description of Artificial Sequence: Synthetic peptide"
  MOD_RES (10)..(10): Citrulline
GAIQEGSITXGTPTSK

SEQ ID NO: 859 - protein, 16 aa, Artificial Sequence
  source: /note="Description of Artificial Sequence: Synthetic peptide"
  MOD_RES (10)..(10): Citrulline
ISVESIPSLXGSITQG

SEQ ID NO: 860 - protein, 16 aa, Artificial Sequence
  source: /note="Description of Artificial Sequence: Synthetic peptide"
  MOD_RES (6)..(6): Citrulline
SIPSLXGSITQGTPAL

SEQ ID NO: 861 - protein, 16 aa, Artificial Sequence
  source: /note="Description of Artificial Sequence: Synthetic peptide"
  MOD_RES (2)..(2): Citrulline
LXGSITQGTPALPQTG

SEQ ID NO: 862 - protein, 16 aa, Artificial Sequence
  source: /note="Description of Artificial Sequence: Synthetic peptide"
  MOD_RES (7)..(7): Citrulline
  MOD_RES (11)..(11): Citrulline
LEGLICXALPXGSPHS

SEQ ID NO: 863 - protein, 16 aa, Artificial Sequence
  source: /note="Description of Artificial Sequence: Synthetic peptide"
  MOD_RES (3)..(3): Citrulline
  MOD_RES (7)..(7): Citrulline
ICXALPXGSPHSDLKE

SEQ ID NO: 864 - protein, 16 aa, Artificial Sequence
  source: /note="Description of Artificial Sequence: Synthetic peptide"
  MOD_RES (11)..(11): Citrulline
SLITGPSKLSXGMPPL

SEQ ID NO: 865 - protein, 16 aa, Artificial Sequence
  source: /note="Description of Artificial Sequence: Synthetic peptide"
  MOD_RES (7)..(7): Citrulline
GPSKLSXGMPPLEIVP

SEQ ID NO: 866 - protein, 16 aa, Artificial Sequence
  source: /note="Description of Artificial Sequence: Synthetic peptide"
  MOD_RES (10)..(10): Citrulline
PVSYQNTMSXGSPMMN

SEQ ID NO: 867 - protein, 16 aa, Artificial Sequence
  source: /note="Description of Artificial Sequence: Synthetic peptide"
  MOD_RES (6)..(6): Citrulline
  MOD_RES (13)..(13): Citrulline
QNTMSXGSPMMNXTSD

SEQ ID NO: 868 - protein, 16 aa, Artificial Sequence
  source: /note="Description of Artificial Sequence: Synthetic peptide"
  MOD_RES (10)..(10): Citrulline
PLGLPYPATXGIIDLT

SEQ ID NO: 869 - protein, 16 aa, Artificial Sequence
  source: /note="Description of Artificial Sequence: Synthetic peptide"
  MOD_RES (6)..(6): Citrulline
PYPATXGIIDLTNMPP

SEQ ID NO: 870 - protein, 16 aa, Artificial Sequence
  source: /note="Description of Artificial Sequence: Synthetic peptide"
  MOD_RES (10)..(10): Citrulline
VTTSGSVSSXGHSFAD

SEQ ID NO: 871 - protein, 16 aa, Artificial Sequence
  source: /note="Description of Artificial Sequence: Synthetic peptide"
  MOD_RES (6)..(6): Citrulline
GSVSSXGHSFADPASN

SEQ ID NO: 872 - protein, 16 aa, Artificial Sequence
  source: /note="Description of Artificial Sequence: Synthetic peptide"
  MOD_RES (9)..(9): Citrulline
  MOD_RES (12)..(12): Citrulline
ENITKVIEXGEXLDEL

SEQ ID NO: 873 - protein, 16 aa, Artificial Sequence
  source: /note="Description of Artificial Sequence: Synthetic peptide"
  MOD_RES (5)..(5): Citrulline
  MOD_RES (8)..(8): Citrulline
KVIEXGEXLDELQDKS

SEQ ID NO: 874 - protein, 16 aa, Artificial Sequence
  source: /note="Description of Artificial Sequence: Synthetic peptide"
  MOD_RES (8)..(8): Citrulline
  MOD_RES (11)..(11): Citrulline
SHGLQSCXNLXGSPKL

SEQ ID NO: 875 - protein, 16 aa, Artificial Sequence
  source: /note="Description of Artificial Sequence: Synthetic peptide"
  MOD_RES (4)..(4): Citrulline
  MOD_RES (7)..(7): Citrulline
QSCXNLXGSPKLPDFL

SEQ ID NO: 876 - protein, 16 aa, Artificial Sequence
  source: /note="Description of Artificial Sequence: Synthetic peptide"
  MOD_RES (3)..(3): Citrulline
  MOD_RES (14)..(14): Citrulline
NLXGSPKLPDFLQXNP

SEQ ID NO: 877 - protein, 16 aa, Artificial Sequence
  source: /note="Description of Artificial Sequence: Synthetic peptide"
  MOD_RES (3)..(3): Citrulline
  MOD_RES (11)..(11): Citrulline
YDXGICPMKGXGLVGA

SEQ ID NO: 878 - protein, 16 aa, Artificial Sequence
  source: /note="Description of Artificial Sequence: Synthetic peptide"
  MOD_RES (9)..(9): Citrulline
INQKYGCNXGQIQSLQ

SEQ ID NO: 879 - protein, 16 aa, Artificial Sequence
  source: /note="Description of Artificial Sequence: Synthetic peptide"
  MOD_RES (5)..(5): Citrulline
YGCNXGQIQSLQQSAA

SEQ ID NO: 880 - protein, 16 aa, Artificial Sequence
  source: /note="Description of Artificial Sequence: Synthetic peptide"
  MOD_RES (5)..(5): Citrulline
  MOD_RES (13)..(13): Citrulline
GSLVXGLGLKNSXSSP

SEQ ID NO: 881 - protein, 16 aa, Artificial Sequence
  source: /note="Description of Artificial Sequence: Synthetic peptide"
  MOD_RES (7)..(7): Citrulline
  MOD_RES (10)..(10): Citrulline
GPGPPGXGSXGAPPPL

SEQ ID NO: 882 - protein, 16 aa, Artificial Sequence
  source: /note="Description of Artificial Sequence: Synthetic peptide"
  MOD_RES (3)..(3): Citrulline
  MOD_RES (6)..(6): Citrulline
PGXGSXGAPPPLGPVV

SEQ ID NO: 883 - protein, 16 aa, Artificial Sequence
  source: /note="Description of Artificial Sequence: Synthetic peptide"
  MOD_RES (9)..(9): Citrulline
YLSTEAGQXGSALGDL

SEQ ID NO: 884 - protein, 16 aa, Artificial Sequence
  source: /note="Description of Artificial Sequence: Synthetic peptide"
  MOD_RES (5)..(5): Citrulline
  MOD_RES (16)..(16): Citrulline
EAGQXGSALGDLAPSX

SEQ ID NO: 885 - protein, 16 aa, Artificial Sequence
  source: /note="Description of Artificial Sequence: Synthetic peptide"
  MOD_RES (10)..(11): Citrulline
FSVEAKNEHXXGSAVS

SEQ ID NO: 886 - protein, 16 aa, Artificial Sequence
  source: /note="Description of Artificial Sequence: Synthetic peptide"
  MOD_RES (6)..(7): Citrulline
AKNEHXXGSAVSWVKE

SEQ ID NO: 887 - protein, 16 aa, Artificial Sequence
  source: /note="Description of Artificial Sequence: Synthetic peptide"
  MOD_RES (13)..(13): Citrulline
FNGDLTDDYVTLXGKP

SEQ ID NO: 888 - protein, 16 aa, Artificial Sequence
  source: /note="Description of Artificial Sequence: Synthetic peptide"
  MOD_RES (9)..(9): Citrulline
LTDDYVTLXGKPVVSS

SEQ ID NO: 889 - protein, 16 aa, Artificial Sequence
  source: /note="Description of Artificial Sequence: Synthetic peptide"
  MOD_RES (13)..(13): Citrulline
SHQLQGGFDGYAXGAQ

SEQ ID NO: 890 - protein, 16 aa, Artificial Sequence
  source: /note="Description of Artificial Sequence: Synthetic peptide"
  MOD_RES (9)..(9): Citrulline
QGGFDGYAXGAQQLAA

SEQ ID NO: 891 - protein, 16 aa, Artificial Sequence
  source: /note="Description of Artificial Sequence: Synthetic peptide"
  MOD_RES (5)..(5): Citrulline
DGYAXGAQQLAAAAGA

SEQ ID NO: 892 - protein, 16 aa, Artificial Sequence
  source: /note="Description of Artificial Sequence: Synthetic peptide"
  MOD_RES (13)..(13): Citrulline
GCSKTPFQQPPPXGQV

SEQ ID NO: 893 - protein, 16 aa, Artificial Sequence
  source: /note="Description of Artificial Sequence: Synthetic peptide"
  MOD_RES (9)..(9): Citrulline
TPFQQPPPXGQVQSSS

SEQ ID NO: 894 - protein, 16 aa, Artificial Sequence
  source: /note="Description of Artificial Sequence: Synthetic peptide"
  MOD_RES (5)..(5): Citrulline
QPPPXGQVQSSSAINL

SEQ ID NO: 895 - protein, 16 aa, Artificial Sequence
  source: /note="Description of Artificial Sequence: Synthetic peptide"
  MOD_RES (14)..(14): Citrulline
QGFGGCMKDVKFTXGA

SEQ ID NO: 896 - protein, 16 aa, Artificial Sequence
  source: /note="Description of Artificial Sequence: Synthetic peptide"
  MOD_RES (10)..(10): Citrulline
GCMKDVKFTXGAVVNL

SEQ ID NO: 897 - protein, 16 aa, Artificial Sequence
  source: /note="Description of Artificial Sequence: Synthetic peptide"
  MOD_RES (6)..(6): Citrulline
DVKFTXGAVVNLASVS

SEQ ID NO: 898 - protein, 16 aa, Artificial Sequence
  source: /note="Description of Artificial Sequence: Synthetic peptide"
  MOD_RES (10)..(10): Citrulline
  MOD_RES (12)..(12): Citrulline
GGSVYSDWSXGXTTGA

SEQ ID NO: 899 - protein, 16 aa, Artificial Sequence
  source: /note="Description of Artificial Sequence: Synthetic peptide"
  MOD_RES (6)..(6): Citrulline
  MOD_RES (8)..(8): Citrulline
YSDWSXGXTTGAAPQS

SEQ ID NO: 900 - protein, 16 aa, Artificial Sequence
  source: /note="Description of Artificial Sequence: Synthetic peptide"
  MOD_RES (8)..(8): Citrulline
DCLEQGGXGSVLQFMP

SEQ ID NO: 901 - protein, 16 aa, Artificial Sequence
  source: /note="Description of Artificial Sequence: Synthetic peptide"
  MOD_RES (4)..(4): Citrulline
QGGXGSVLQFMPFTTV

SEQ ID NO: 902 - protein, 16 aa, Artificial Sequence
  source: /note="Description of Artificial Sequence: Synthetic peptide"
  MOD_RES (7)..(7): Citrulline
  MOD_RES (15)..(15): Citrulline
TLTSKYXGESEKLVXL

SEQ ID NO: 903 - protein, 16 aa, Artificial Sequence
  source: /note="Description of Artificial Sequence: Synthetic peptide"
  MOD_RES (9)..(9): Citrulline
HEGVAVVPXGSTLPLL

SEQ ID NO: 904 - protein, 16 aa, Artificial Sequence
  source: /note="Description of Artificial Sequence: Synthetic peptide"
  MOD_RES (5)..(5): Citrulline
AVVPXGSTLPLLEGPQ

SEQ ID NO: 905 - protein, 16 aa, Artificial Sequence
  source: /note="Description of Artificial Sequence: Synthetic peptide"
  MOD_RES (11)..(11): Citrulline
PCYNYCSNIMXGCLAN

SEQ ID NO: 906 - protein, 16 aa, Artificial Sequence
  source: /note="Description of Artificial Sequence: Synthetic peptide"
  MOD_RES (7)..(7): Citrulline
YCSNIMXGCLANQGDL

SEQ ID NO: 907 - protein, 16 aa, Artificial Sequence
  source: /note="Description of Artificial Sequence: Synthetic peptide"
  MOD_RES (3)..(3): Citrulline
IMXGCLANQGDLDFEW

SEQ ID NO: 908 - protein, 16 aa, Artificial Sequence
  source: /note="Description of Artificial Sequence: Synthetic peptide"
  MOD_RES (4)..(4): Citrulline
  MOD_RES (14)..(14): Citrulline
LWWXGILGASALTXGT

SEQ ID NO: 909 - protein, 16 aa, Artificial Sequence
  source: /note="Description of Artificial Sequence: Synthetic peptide"
  MOD_RES (10)..(10): Citrulline
  MOD_RES (14)..(14): Citrulline
GILGASALTXGTGXPS

SEQ ID NO: 910 - protein, 16 aa, Artificial Sequence
  source: /note="Description of Artificial Sequence: Synthetic peptide"
  MOD_RES (3)..(3): Citrulline
  MOD_RES (9)..(9): Citrulline
DVXCKQCAXGTFSDVP

SEQ ID NO: 911 - protein, 16 aa, Artificial Sequence
  source: /note="Description of Artificial Sequence: Synthetic peptide"
  MOD_RES (5)..(5): Citrulline
KQCAXGTFSDVPSSVM

SEQ ID NO: 912 - protein, 16 aa, Artificial Sequence
  source: /note="Description of Artificial Sequence: Synthetic peptide"
  MOD_RES (4)..(4): Citrulline
  MOD_RES (12)..(12): Citrulline
VTAXPVGVVVPXGTPT

SEQ ID NO: 913 - protein, 16 aa, Artificial Sequence
  source: /note="Description of Artificial Sequence: Synthetic peptide"
  MOD_RES (8)..(8): Citrulline
  MOD_RES (14)..(14): Citrulline
PVGVVVPXGTPTPXGV

SEQ ID NO: 914 - protein, 16 aa, Artificial Sequence
  source: /note="Description of Artificial Sequence: Synthetic peptide"
  MOD_RES (8)..(8): Citrulline
  MOD_RES (12)..(12): Citrulline
DYGDHLSXGSHXEPFE

SEQ ID NO: 915 - protein, 16 aa, Artificial Sequence
  source: /note="Description of Artificial Sequence: Synthetic peptide"
  MOD_RES (4)..(4): Citrulline
  MOD_RES (8)..(8): Citrulline
HLSXGSHXEPFESYGE

SEQ ID NO: 916 - protein, 16 aa, Artificial Sequence
  source: /note="Description of Artificial Sequence: Synthetic peptide"
  MOD_RES (4)..(4): Citrulline
  MOD_RES (14)..(14): Citrulline
GSHXEPFESYGELXGA

SEQ ID NO: 917 - protein, 16 aa, Artificial Sequence
  source: /note="Description of Artificial Sequence: Synthetic peptide"
  MOD_RES (6)..(6): Citrulline
  MOD_RES (12)..(12): Citrulline
SYGELXGAAPGXGTPP

SEQ ID NO: 918 - protein, 16 aa, Artificial Sequence
  source: /note="Description of Artificial Sequence: Synthetic peptide"
  MOD_RES (2)..(2): Citrulline
  MOD_RES (8)..(8): Citrulline
LXGAAPGXGTPPSYGG

SEQ ID NO: 919 - protein, 16 aa, Artificial Sequence
  source: /note="Description of Artificial Sequence: Synthetic peptide"
  MOD_RES (4)..(4): Citrulline
  MOD_RES (15)..(15): Citrulline
APGXGTPPSYGGGGXY

SEQ ID NO: 920 - protein, 16 aa, Artificial Sequence
  source: /note="Description of Artificial Sequence: Synthetic peptide"
  MOD_RES (8)..(8): Citrulline
IDEVSAAXGDKLCQDS

SEQ ID NO: 921 - protein, 16 aa, Artificial Sequence
  source: /note="Description of Artificial Sequence: Synthetic peptide"
  MOD_RES (4)..(4): Citrulline
SAAXGDKLCQDSMMKL

SEQ ID NO: 922 - protein, 16 aa, Artificial Sequence
  source: /note="Description of Artificial Sequence: Synthetic peptide"
  MOD_RES (12)..(12): Citrulline
CSLSSNGTNQTXGQIP

SEQ ID NO: 923 - protein, 16 aa, Artificial Sequence
  source: /note="Description of Artificial Sequence: Synthetic peptide"
  MOD_RES (8)..(8): Citrulline
SNGTNQTXGQIPQILY

SEQ ID NO: 924 - protein, 16 aa, Artificial Sequence
  source: /note="Description of Artificial Sequence: Synthetic peptide"
  MOD_RES (6)..(6): Citrulline
  MOD_RES (12)..(12): Citrulline
SGHNIXSCPNLXGIPI

SEQ ID NO: 925 - protein, 16 aa, Artificial Sequence
  source: /note="Description of Artificial Sequence: Synthetic peptide"
  MOD_RES (2)..(2): Citrulline
  MOD_RES (8)..(8): Citrulline
IXSCPNLXGIPIGMLV

SEQ ID NO: 926 - protein, 16 aa, Artificial Sequence
  source: /note="Description of Artificial Sequence: Synthetic peptide"
  MOD_RES (5)..(6): Citrulline
SSYLXXGESHWWMKGS

SEQ ID NO: 927 - protein, 16 aa, Artificial Sequence
  source: /note="Description of Artificial Sequence: Synthetic peptide"
  MOD_RES (10)..(10): Citrulline
KKLYQTFKDXGILDTL

SEQ ID NO: 928 - protein, 16 aa, Artificial Sequence
  source: /note="Description of Artificial Sequence: Synthetic peptide"
  MOD_RES (6)..(6): Citrulline
QTFKDXGILDTLKTQL

SEQ ID NO: 929 - protein, 16 aa, Artificial Sequence
  source: /note="Description of Artificial Sequence: Synthetic peptide"
  MOD_RES (2)..(2): Citrulline
  MOD_RES (9)..(9): Citrulline
KXLKLEGLXGSSWLQD

SEQ ID NO: 930 - protein, 16 aa, Artificial Sequence
  source: /note="Description of Artificial Sequence: Synthetic peptide"
  MOD_RES (5)..(5): Citrulline
  MOD_RES (16)..(16): Citrulline
LEGLXGSSWLQDGSAX

SEQ ID NO: 931 - protein, 16 aa, Artificial Sequence
  source: /note="Description of Artificial Sequence: Synthetic peptide"
  MOD_RES (1)..(1): Citrulline
  MOD_RES (12)..(12): Citrulline
XGSSWLQDGSAXSSPP

SEQ ID NO: 932 - protein, 16 aa, Artificial Sequence
  source: /note="Description of Artificial Sequence: Synthetic peptide"
  MOD_RES (11)..(11): Citrulline
  MOD_RES (14)..(14): Citrulline
GLNATFMAFNXGKXEG

SEQ ID NO: 933 - protein, 16 aa, Artificial Sequence
  source: /note="Description of Artificial Sequence: Synthetic peptide"
  MOD_RES (10)..(10): Citrulline
FKDPLDAFAXGEVFIG

SEQ ID NO: 934 - protein, 16 aa, Artificial Sequence
  source: /note="Description of Artificial Sequence: Synthetic peptide"
  MOD_RES (6)..(6): Citrulline
LDAFAXGEVFIGSKES

SEQ ID NO: 935 - protein, 16 aa, Artificial Sequence
  source: /note="Description of Artificial Sequence: Synthetic peptide"
  MOD_RES (2)..(2): Citrulline
AXGEVFIGSKESGYTV

SEQ ID NO: 936 - protein, 16 aa, Artificial Sequence
  source: /note="Description of Artificial Sequence: Synthetic peptide"
  MOD_RES (11)..(11): Citrulline
SCLLLPPTPVXGGQKA

SEQ ID NO: 937 - protein, 16 aa, Artificial Sequence
  source: /note="Description of Artificial Sequence: Synthetic peptide"
  MOD_RES (7)..(7): Citrulline
  MOD_RES (16)..(16): Citrulline
LPPTPVXGGQKAVVSX

SEQ ID NO: 938 - protein, 16 aa, Artificial Sequence
  source: /note="Description of Artificial Sequence: Synthetic peptide"
  MOD_RES (14)..(14): Citrulline
QCDCTDSFNVVSTXGS

SEQ ID NO: 939 - protein, 16 aa, Artificial Sequence
  source: /note="Description of Artificial Sequence: Synthetic peptide"
  MOD_RES (10)..(10): Citrulline
  MOD_RES (14)..(14): Citrulline
TDSFNVVSTXGSLXTQ

SEQ ID NO: 940 - protein, 16 aa, Artificial Sequence
  source: /note="Description of Artificial Sequence: Synthetic peptide"
  MOD_RES (6)..(6): Citrulline
  MOD_RES (10)..(10): Citrulline
NVVSTXGSLXTQDSVP

SEQ ID NO: 941 - protein, 16 aa, Artificial Sequence
  source: /note="Description of Artificial Sequence: Synthetic peptide"
  MOD_RES (10)..(10): Citrulline
NPAFATGCGXGAKLPS

SEQ ID NO: 942 - protein, 16 aa, Artificial Sequence
  source: /note="Description of Artificial Sequence: Synthetic peptide"
  MOD_RES (6)..(6): Citrulline
ATGCGXGAKLPSCAQG

SEQ ID NO: 943 - protein, 16 aa, Artificial Sequence
  source: /note="Description of Artificial Sequence: Synthetic peptide"
  MOD_RES (2)..(2): Citrulline
GXGAKLPSCAQGSHTE

SEQ ID NO: 944 - protein, 16 aa, Artificial Sequence
  source: /note="Description of Artificial Sequence: Synthetic peptide"
  MOD_RES (6)..(6): Citrulline
  MOD_RES (11)..(11): Citrulline
IFAWTXGLAHXAKLDN

SEQ ID NO: 945 - protein, 16 aa, Artificial Sequence
  source: /note="Description of Artificial Sequence: Synthetic peptide"
  MOD_RES (2)..(2): Citrulline
  MOD_RES (7)..(7): Citrulline
TXGLAHXAKLDNNKEL

SEQ ID NO: 946 - protein, 15 aa, Artificial Sequence
  source: /note="Description of Artificial Sequence: Synthetic peptide"
  MOD_RES (10)..(10): Citrulline
CGILSEPSTXGLKAA

SEQ ID NO: 947 - protein, 16 aa, Artificial Sequence
  source: /note="Description of Artificial Sequence: Synthetic peptide"
  MOD_RES (6)..(6): Citrulline
SEPSTXGLKAATCINP

SEQ ID NO: 948 - protein, 16 aa, Artificial Sequence
  source: /note="Description of Artificial Sequence: Synthetic peptide"
  MOD_RES (7)..(8): Citrulline
PPFVFTXXGSMFYDED

SEQ ID NO: 949 - protein, 16 aa, Artificial Sequence
  source: /note="Description of Artificial Sequence: Synthetic peptide"
  MOD_RES (3)..(4): Citrulline
FTXXGSMFYDEDGDLA

SEQ ID NO: 950 - protein, 16 aa, Artificial Sequence
  source: /note="Description of Artificial Sequence: Synthetic peptide"
  MOD_RES (2)..(2): Citrulline
  MOD_RES (10)..(10): Citrulline
PXLAWFPLTXGSQPSG

SEQ ID NO: 951 - protein, 16 aa, Artificial Sequence
  source: /note="Description of Artificial Sequence: Synthetic peptide"
  MOD_RES (6)..(6): Citrulline
WFPLTXGSQPSGELLA

SEQ ID NO: 952 - protein, 16 aa, Artificial Sequence
  source: /note="Description of Artificial Sequence: Synthetic peptide"
  MOD_RES (3)..(3): Citrulline
  MOD_RES (12)..(12): Citrulline
LLXEYSTSIATXGVMH

SEQ ID NO: 953 - protein, 16 aa, Artificial Sequence
  source: /note="Description of Artificial Sequence: Synthetic peptide"
  MOD_RES (8)..(8): Citrulline
YSTSIATXGVMHSNKA

SEQ ID NO: 954 - protein, 16 aa, Artificial Sequence
  source: /note="Description of Artificial Sequence: Synthetic peptide"
  MOD_RES (4)..(4): Citrulline
  MOD_RES (13)..(13): Citrulline
IATXGVMHSNKAXGYA

SEQ ID NO: 955 - protein, 16 aa, Artificial Sequence
  source: /note="Description of Artificial Sequence: Synthetic peptide"
  MOD_RES (10)..(10): Citrulline
LPFPKVPTQXGDLIVE

SEQ ID NO: 956 - protein, 16 aa, Artificial Sequence
  source: /note="Description of Artificial Sequence: Synthetic peptide"
  MOD_RES (6)..(6): Citrulline
  MOD_RES (16)..(16): Citrulline
KVPTQXGDLIVEFKVX

SEQ ID NO: 957 - protein, 16 aa, Artificial Sequence
  source: /note="Description of Artificial Sequence: Synthetic peptide"
  MOD_RES (8)..(8): Citrulline
  MOD_RES (11)..(11): Citrulline
VAYLSGGXDKXGGPIL

SEQ ID NO: 958 - protein, 16 aa, Artificial Sequence
  source: /note="Description of Artificial Sequence: Synthetic peptide"
  MOD_RES (6)..(6): Citrulline
QLVIAXGSLPQLVSPI

SEQ ID NO: 959 - protein, 16 aa, Artificial Sequence
  source: /note="Description of Artificial Sequence: Synthetic peptide"
  MOD_RES (6)..(6): Citrulline
  MOD_RES (9)..(9): Citrulline
ASEDGXLKXGDQIIAV

SEQ ID NO: 960 - protein, 16 aa, Artificial Sequence
  source: /note="Description of Artificial Sequence: Synthetic peptide"
  MOD_RES (2)..(2): Citrulline
  MOD_RES (5)..(5): Citrulline
GXLKXGDQIIAVNGQS

SEQ ID NO: 961 - protein, 16 aa, Artificial Sequence
  source: /note="Description of Artificial Sequence: Synthetic peptide"
  MOD_RES (9)..(9): Citrulline
MKQVHQGVXGFVLDAT

SEQ ID NO: 962 - protein, 16 aa, Artificial Sequence
  source: /note="Description of Artificial Sequence: Synthetic peptide"
  MOD_RES (5)..(5): Citrulline
  MOD_RES (15)..(15): Citrulline
HQGVXGFVLDATDGXG

SEQ ID NO: 963 - protein, 16 aa, Artificial Sequence
  source: /note="Description of Artificial Sequence: Synthetic peptide"
  MOD_RES (9)..(9): Citrulline
  MOD_RES (12)..(12): Citrulline
VNVPEKNSXKLXGETV

SEQ ID NO: 964 - protein, 16 aa, Artificial Sequence
  source: /note="Description of Artificial Sequence: Synthetic peptide"
  MOD_RES (5)..(5): Citrulline
  MOD_RES (8)..(8): Citrulline
EKNSXKLXGETVQVDT

SEQ ID NO: 965 - protein, 16 aa, Artificial Sequence
  source: /note="Description of Artificial Sequence: Synthetic peptide"
  MOD_RES (4)..(4): Citrulline
  MOD_RES (10)..(10): Citrulline
KEGXSSHVQXGYGKVQ

SEQ ID NO: 966 - protein, 16 aa, Artificial Sequence
  source: /note="Description of Artificial Sequence: Synthetic peptide"
  MOD_RES (6)..(6): Citrulline
SSHVQXGYGKVQAEFP

SEQ ID NO: 967 - protein, 16 aa, Artificial Sequence
  source: /note="Description of Artificial Sequence: Synthetic peptide"
  MOD_RES (10)..(10): Citrulline
PAPYPVLQVXGTSMCP

SEQ ID NO: 968 - protein, 16 aa, Artificial Sequence
  source: /note="Description of Artificial Sequence: Synthetic peptide"
  MOD_RES (6)..(6): Citrulline
PVLQVXGTSMCPTLQV

SEQ ID NO: 969 - protein, 16 aa, Artificial Sequence
  source: /note="Description of Artificial Sequence: Synthetic peptide"
  MOD_RES (2)..(2): Citrulline
  MOD_RES (13)..(13): Citrulline
VXGTSMCPTLQVXGTD

SEQ ID NO: 970 - protein, 16 aa, Artificial Sequence
  source: /note="Description of Artificial Sequence: Synthetic peptide"
  MOD_RES (10)..(10): Citrulline
AVKYKGELQXGTAISD

SEQ ID NO: 971 - protein, 16 aa, Artificial Sequence
  source: /note="Description of Artificial Sequence: Synthetic peptide"
  MOD_RES (6)..(6): Citrulline
KGELQXGTAISDPPEL

SEQ ID NO: 972 - protein, 16 aa, Artificial Sequence
  source: /note="Description of Artificial Sequence: Synthetic peptide"
  MOD_RES (12)..(12): Citrulline
ENQKNISNVYYXGQLG

SEQ ID NO: 973 - protein, 16 aa, Artificial Sequence
  source: /note="Description of Artificial Sequence: Synthetic peptide"
  MOD_RES (8)..(8): Citrulline
  MOD_RES (13)..(13): Citrulline
NISNVYYXGQLGXATT

SEQ ID NO: 974 - protein, 16 aa, Artificial Sequence
  source: /note="Description of Artificial Sequence: Synthetic peptide"
  MOD_RES (10)..(10): Citrulline
QYEHSVQISXGSSHQV

SEQ ID NO: 975 - protein, 16 aa, Artificial Sequence
  source: /note="Description of Artificial Sequence: Synthetic peptide"
  MOD_RES (6)..(6): Citrulline
SVQISXGSSHQVEYEI

SEQ ID NO: 976 - protein, 16 aa, Artificial Sequence
  source: /note="Description of Artificial Sequence: Synthetic peptide"
  MOD_RES (2)..(2): Citrulline
  MOD_RES (13)..(13): Citrulline
LXSMQYNGSYFDXGAK

SEQ ID NO: 977 - protein, 16 aa, Artificial Sequence
  source: /note="Description of Artificial Sequence: Synthetic peptide"
  MOD_RES (9)..(9): Citrulline
  MOD_RES (16)..(16): Citrulline
QYNGSYFDXGAKGGSX

SEQ ID NO: 978 - protein, 16 aa, Artificial Sequence
  source: /note="Description of Artificial Sequence: Synthetic peptide"
  MOD_RES (5)..(5): Citrulline
  MOD_RES (12)..(12): Citrulline
SYFDXGAKGGSXLCTP

SEQ ID NO: 979 - protein, 16 aa, Artificial Sequence
  source: /note="Description of Artificial Sequence: Synthetic peptide"
  MOD_RES (5)..(5): Citrulline
  MOD_RES (9)..(9): Citrulline
GLSKXTNQXGAEILAD

SEQ ID NO: 980 - protein, 16 aa, Artificial Sequence
  source: /note="Description of Artificial Sequence: Synthetic peptide"
  MOD_RES (1)..(1): Citrulline
  MOD_RES (5)..(5): Citrulline
XTNQXGAEILADTFKD

SEQ ID NO: 981 - protein, 16 aa, Artificial Sequence
  source: /note="Description of Artificial Sequence: Synthetic peptide"
  MOD_RES (14)..(14): Citrulline
SNGSFSAPSLTNSXGS

SEQ ID NO: 982 - protein, 16 aa, Artificial Sequence
  source: /note="Description of Artificial Sequence: Synthetic peptide"
  MOD_RES (11)..(12): Citrulline
VHYPGEAVATXXGSPL

SEQ ID NO: 983 - protein, 16 aa, Artificial Sequence
  source: /note="Description of Artificial Sequence: Synthetic peptide"
  MOD_RES (7)..(8): Citrulline
GEAVATXXGSPLLIGV

SEQ ID NO: 984 - protein, 16 aa, Artificial Sequence
  source: /note="Description of Artificial Sequence: Synthetic peptide"
  MOD_RES (9)..(9): Citrulline
  MOD_RES (11)..(11): Citrulline
IYLAKKNIXKXGTLVD

SEQ ID NO: 985 - protein, 16 aa, Artificial Sequence
  source: /note="Description of Artificial Sequence: Synthetic peptide"
  MOD_RES (5)..(5): Citrulline
  MOD_RES (7)..(7): Citrulline
KKNIXKXGTLVDYEKD

SEQ ID NO: 986 - protein, 16 aa, Artificial Sequence
  source: /note="Description of Artificial Sequence: Synthetic peptide"
  MOD_RES (8)..(8): Citrulline
NKISTIEXGAFQDLKE

SEQ ID NO: 987 - protein, 16 aa, Artificial Sequence
  source: /note="Description of Artificial Sequence: Synthetic peptide"
  MOD_RES (4)..(4): Citrulline
  MOD_RES (15)..(15): Citrulline
TIEXGAFQDLKELEXL

SEQ ID NO: 988 - protein, 16 aa, Artificial Sequence
  source: /note="Description of Artificial Sequence: Synthetic peptide"
  MOD_RES (4)..(4): Citrulline
  MOD_RES (8)..(8): Citrulline
AIPXKAFXGAVDIKNL

SEQ ID NO: 989 - protein, 16 aa, Artificial Sequence
  source: /note="Description of Artificial Sequence: Synthetic peptide"
  MOD_RES (4)..(4): Citrulline
KAFXGAVDIKNLQLDY

SEQ ID NO: 990 - protein, 16 aa, Artificial Sequence
  source: /note="Description of Artificial Sequence: Synthetic peptide"
  MOD_RES (2)..(2): Citrulline
  MOD_RES (11)..(11): Citrulline
DXWAPVAPLPXGAFAV

SEQ ID NO: 991 - protein, 16 aa, Artificial Sequence
  source: /note="Description of Artificial Sequence: Synthetic peptide"
  MOD_RES (7)..(7): Citrulline
PVAPLPXGAFAVAHEA

SEQ ID NO: 992 - protein, 16 aa, Artificial Sequence
  source: /note="Description of Artificial Sequence: Synthetic peptide"
  MOD_RES (2)..(2): Citrulline
  MOD_RES (9)..(9): Citrulline
LXANALIKXGSMYMQQ

SEQ ID NO: 993 - protein, 16 aa, Artificial Sequence
  source: /note="Description of Artificial Sequence: Synthetic peptide"
  MOD_RES (5)..(5): Citrulline
ALIKXGSMYMQQQQPL

SEQ ID NO: 994 - protein, 16 aa, Artificial Sequence
  source: /note="Description of Artificial Sequence: Synthetic peptide"
  MOD_RES (11)..(11): Citrulline
DPQNADVYHHXGQLKI

SEQ ID NO: 995 - protein, 16 aa, Artificial Sequence
  source: /note="Description of Artificial Sequence: Synthetic peptide"
  MOD_RES (7)..(7): Citrulline
ADVYHHXGQLKILLDQ

SEQ ID NO: 996 - protein, 16 aa, Artificial Sequence
  source: /note="Description of Artificial Sequence: Synthetic peptide"
  MOD_RES (10)..(10): Citrulline
VIPATVVTSXGLQLGQ

SEQ ID NO: 997 - protein, 16 aa, Artificial Sequence
  source: /note="Description of Artificial Sequence: Synthetic peptide"
  MOD_RES (6)..(6): Citrulline
TVVTSXGLQLGQTSTA

SEQ ID NO: 998 - protein, 16 aa, Artificial Sequence
  source: /note="Description of Artificial Sequence: Synthetic peptide"
  MOD_RES (2)..(2): Citrulline
SXGLQLGQTSTATIQP

SEQ ID NO: 999 - protein, 16 aa, Artificial Sequence
  source: /note="Description of Artificial Sequence: Synthetic peptide"
  MOD_RES (10)..(10): Citrulline
AGPLGATATXGMLPPG

SEQ ID NO: 1000 - protein, 16 aa, Artificial Sequence
  source: /note="Description of Artificial Sequence: Synthetic peptide"
  MOD_RES (6)..(6): Citrulline
GATATXGMLPPGPPPP

SEQ ID NO: 1001 - protein, 16 aa, Artificial Sequence
  source: /note="Description of Artificial Sequence: Synthetic peptide"
  MOD_RES (2)..(2): Citrulline
  MOD_RES (12)..(12): Citrulline
SXGGQVYATNTXGQIP

SEQ ID NO: 1002 - protein, 16 aa, Artificial Sequence
  source: /note="Description of Artificial Sequence: Synthetic peptide"
  MOD_RES (8)..(8): Citrulline
QVYATNTXGQIPPLVT

SEQ ID NO: 1003 - protein, 16 aa, Artificial Sequence
  source: /note="Description of Artificial Sequence: Synthetic peptide"
  MOD_RES (11)..(11): Citrulline
SPDAPCLPVKXGSPAS

SEQ ID NO: 1004 - protein, 16 aa, Artificial Sequence
  source: /note="Description of Artificial Sequence: Synthetic peptide"
  MOD_RES (7)..(7): Citrulline
PCLPVKXGSPASPTSP

SEQ ID NO: 1005 - protein, 16 aa, Artificial Sequence
  source: /note="Description of Artificial Sequence: Synthetic peptide"
  MOD_RES (11)..(11): Citrulline
APLGYVPGLGXGATGF

SEQ ID NO: 1006 - protein, 16 aa, Artificial Sequence
  source: /note="Description of Artificial Sequence: Synthetic peptide"
  MOD_RES (7)..(7): Citrulline
  MOD_RES (15)..(15): Citrulline
YVPGLGXGATGFTTXS

SEQ ID NO: 1007 - protein, 16 aa, Artificial Sequence
  source: /note="Description of Artificial Sequence: Synthetic peptide"
  MOD_RES (3)..(3): Citrulline
  MOD_RES (11)..(11): Citrulline
LGXGATGFTTXSDIGP

SEQ ID NO: 1008 - protein, 16 aa, Artificial Sequence
  source: /note="Description of Artificial Sequence: Synthetic peptide"
  MOD_RES (7)..(7): Citrulline
  MOD_RES (10)..(10): Citrulline
IASELAXHTXGSIYAG

SEQ ID NO: 1009 - protein, 16 aa, Artificial Sequence
  source: /note="Description of Artificial Sequence: Synthetic peptide"
  MOD_RES (3)..(3): Citrulline
  MOD_RES (6)..(6): Citrulline
LAXHTXGSIYAGDVSS

SEQ ID NO: 1010 - protein, 16 aa, Artificial Sequence
  source: /note="Description of Artificial Sequence: Synthetic peptide"
  MOD_RES (2)..(2): Citrulline
  MOD_RES (6)..(6): Citrulline
SXSLQXGEDLQFDQLI

SEQ ID NO: 1011 - protein, 16 aa, Artificial Sequence
  source: /note="Description of Artificial Sequence: Synthetic peptide"
  MOD_RES (13)..(13): Citrulline
ALNTDYLDSDYQXGQL

SEQ ID NO: 1012 - protein, 16 aa, Artificial Sequence
  source: /note="Description of Artificial Sequence: Synthetic peptide"
  MOD_RES (9)..(9): Citrulline
DYLDSDYQXGQLYPFS

SEQ ID NO: 1013 - protein, 16 aa, Artificial Sequence
  source: /note="Description of Artificial Sequence: Synthetic peptide"
  MOD_RES (5)..(5): Citrulline
SDYQXGQLYPFSLSSD

SEQ ID NO: 1014 - protein, 16 aa, Artificial Sequence
  source: /note="Description of Artificial Sequence: Synthetic peptide"
  MOD_RES (7)..(7): Citrulline
  MOD_RES (12)..(12): Citrulline
KLGKEAXSLYEXGMES

SEQ ID NO: 1015 - protein, 16 aa, Artificial Sequence
  source: /note="Description of Artificial Sequence: Synthetic peptide"
  MOD_RES (3)..(3): Citrulline
  MOD_RES (8)..(8): Citrulline
EAXSLYEXGMESLKAM

SEQ ID NO: 1016 - protein, 16 aa, Artificial Sequence
  source: /note="Description of Artificial Sequence: Synthetic peptide"
  MOD_RES (4)..(4): Citrulline
LYEXGMESLKAMLPLY

SEQ ID NO: 1017 - protein, 16 aa, Artificial Sequence
  source: /note="Description of Artificial Sequence: Synthetic peptide"
  MOD_RES (10)..(10): Citrulline
GGWPAEPLAXGLSSSP

SEQ ID NO: 1018 - protein, 16 aa, Artificial Sequence
  source: /note="Description of Artificial Sequence: Synthetic peptide"
  MOD_RES (6)..(6): Citrulline
AEPLAXGLSSSPSEIL

SEQ ID NO: 1019 - protein, 16 aa, Artificial Sequence
  source: /note="Description of Artificial Sequence: Synthetic peptide"
  MOD_RES (11)..(11): Citrulline
IPYQQNPYNPXGSSNV

SEQ ID NO: 1020 - protein, 16 aa, Artificial Sequence
  source: /note="Description of Artificial Sequence: Synthetic peptide"
  MOD_RES (8)..(8): Citrulline
  MOD_RES (11)..(11): Citrulline
SMPSFTAXLTXGQLQH

SEQ ID NO: 1021 - protein, 16 aa, Artificial Sequence
  source: /note="Description of Artificial Sequence: Synthetic peptide"
  MOD_RES (3)..(3): Citrulline
  MOD_RES (12)..(12): Citrulline
LTXGQLQHLGTXGSNT

SEQ ID NO: 1022 - protein, 16 aa, Artificial Sequence
  source: /note="Description of Artificial Sequence: Synthetic peptide"
  MOD_RES (12)..(12): Citrulline
EFEDGSQLTVKXGDIF

SEQ ID NO: 1023 - protein, 16 aa, Artificial Sequence
  source: /note="Description of Artificial Sequence: Synthetic peptide"
  MOD_RES (8)..(8): Citrulline
GSQLTVKXGDIFTLEE

SEQ ID NO: 1024 - protein, 16 aa, Artificial Sequence
  source: /note="Description of Artificial Sequence: Synthetic peptide"
  MOD_RES (9)..(9): Citrulline
PYLAGGDAXGKKLPNN

SEQ ID NO: 1025 - protein, 16 aa, Artificial Sequence
  source: /note="Description of Artificial Sequence: Synthetic peptide"
  MOD_RES (5)..(5): Citrulline
GGDAXGKKLPNNPAFG

SEQ ID NO: 1026 - protein, 16 aa, Artificial Sequence
  source: /note="Description of Artificial Sequence: Synthetic peptide"
  MOD_RES (3)..(3): Citrulline
  MOD_RES (10)..(10): Citrulline
PDXFLNSPQXGQTYGG

SEQ ID NO: 1027 - protein, 16 aa, Artificial Sequence
  source: /note="Description of Artificial Sequence: Synthetic peptide"
  MOD_RES (6)..(6): Citrulline
LNSPQXGQTYGGGQGV

SEQ ID NO: 1028 - protein, 16 aa, Artificial Sequence
  source: /note="Description of Artificial Sequence: Synthetic peptide"
  MOD_RES (5)..(5): Citrulline
  MOD_RES (8)..(8): Citrulline
EPSSXVGXGEALFGGP

SEQ ID NO: 1029 - protein, 16 aa, Artificial Sequence
  source: /note="Description of Artificial Sequence: Synthetic peptide"
  MOD_RES (1)..(1): Citrulline
  MOD_RES (4)..(4): Citrulline
XVGXGEALFGGPVGAS

SEQ ID NO: 1030 - protein, 16 aa, Artificial Sequence
  source: /note="Description of Artificial Sequence: Synthetic peptide"
  MOD_RES (5)..(5): Citrulline
  MOD_RES (8)..(8): Citrulline
QDADXFYXGILEPDKH

SEQ ID NO: 1031 - protein, 16 aa, Artificial Sequence
  source: /note="Description of Artificial Sequence: Synthetic peptide"
  MOD_RES (1)..(1): Citrulline
  MOD_RES (4)..(4): Citrulline
XFYXGILEPDKHCSTT

SEQ ID NO: 1032 - protein, 16 aa, Artificial Sequence
  source: /note="Description of Artificial Sequence: Synthetic peptide"
  MOD_RES (10)..(10): Citrulline
QITSSLFLGXGSVASN

SEQ ID NO: 1033 - protein, 16 aa, Artificial Sequence
  source: /note="Description of Artificial Sequence: Synthetic peptide"
  MOD_RES (6)..(6): Citrulline
  MOD_RES (13)..(13): Citrulline
SLFLGXGSVASNXHLL

SEQ ID NO: 1034 - protein, 16 aa, Artificial Sequence
  source: /note="Description of Artificial Sequence: Synthetic peptide"
  MOD_RES (13)..(13): Citrulline
GPLHISVQALTSXGSS

SEQ ID NO: 1035 - protein, 16 aa, Artificial Sequence
  source: /note="Description of Artificial Sequence: Synthetic peptide"
  MOD_RES (9)..(9): Citrulline
  MOD_RES (16)..(16): Citrulline
ISVQALTSXGSSDPLX

SEQ ID NO: 1036 - protein, 16 aa, Artificial Sequence
  source: /note="Description of Artificial Sequence: Synthetic peptide"
  MOD_RES (3)..(3): Citrulline
  MOD_RES (9)..(9): Citrulline
AGXQQLLQXGYLSPDI

SEQ ID NO: 1037 - protein, 16 aa, Artificial Sequence
  source: /note="Description of Artificial Sequence: Synthetic peptide"
  MOD_RES (5)..(5): Citrulline
QLLQXGYLSPDILLEG

SEQ ID NO: 1038 - protein, 16 aa, Artificial Sequence
  source: /note="Description of Artificial Sequence: Synthetic peptide"
  MOD_RES (14)..(14): Citrulline
GPKQYPYNNLYLEXGG

SEQ ID NO: 1039 - protein, 16 aa, Artificial Sequence
  source: /note="Description of Artificial Sequence: Synthetic peptide"
  MOD_RES (10)..(10): Citrulline
YPYNNLYLEXGGDPSK

SEQ ID NO: 1040 - protein, 16 aa, Artificial Sequence
  source: /note="Description of Artificial Sequence: Synthetic peptide"
  MOD_RES (10)..(10): Citrulline
ITFLQGSYTXGIDPNY

SEQ ID NO: 1041 - protein, 16 aa, Artificial Sequence
  source: /note="Description of Artificial Sequence: Synthetic peptide"
  MOD_RES (6)..(6): Citrulline
QGSYTXGIDPNYANKV

SEQ ID NO: 1042 - protein, 16 aa, Artificial Sequence
  source: /note="Description of Artificial Sequence: Synthetic peptide"
  MOD_RES (2)..(2): Citrulline
TXGIDPNYANKVSIPV

SEQ ID NO: 1043 - protein, 16 aa, Artificial Sequence
  source: /note="Description of Artificial Sequence: Synthetic peptide"
  MOD_RES (10)..(10): Citrulline
DPETNKNITXGQSLDN

SEQ ID NO: 1044 - protein, 16 aa, Artificial Sequence
  source: /note="Description of Artificial Sequence: Synthetic peptide"
  MOD_RES (6)..(6): Citrulline
NKNITXGQSLDNLIKV

SEQ ID NO: 1045 - protein, 16 aa, Artificial Sequence
  source: /note="Description of Artificial Sequence: Synthetic peptide"
  MOD_RES (13)..(13): Citrulline
SLAVTPNGHLEGXGSL

SEQ ID NO: 1046 - protein, 16 aa, Artificial Sequence
  source: /note="Description of Artificial Sequence: Synthetic peptide"
  MOD_RES (9)..(9): Citrulline
TPNGHLEGXGSLSPPL

SEQ ID NO: 1047 - protein, 16 aa, Artificial Sequence
  source: /note="Description of Artificial Sequence: Synthetic peptide"
  MOD_RES (8)..(9): Citrulline
APSLPDSXXGSSSSGD

SEQ ID NO: 1048 - protein, 16 aa, Artificial Sequence
  source: /note="Description of Artificial Sequence: Synthetic peptide"
  MOD_RES (1)..(1): Citrulline
  MOD_RES (10)..(10): Citrulline
XNNFGKVLEXGVKLAE

SEQ ID NO: 1049 - protein, 16 aa, Artificial Sequence
  source: /note="Description of Artificial Sequence: Synthetic peptide"
  MOD_RES (6)..(6): Citrulline
  MOD_RES (16)..(16): Citrulline
GKVLEXGVKLAELQQX

SEQ ID NO: 1050 - protein, 16 aa, Artificial Sequence
  source: /note="Description of Artificial Sequence: Synthetic peptide"
  MOD_RES (5)..(5): Citrulline
  MOD_RES (7)..(7): Citrulline
VTEDXLXGQLKQWLDL

SEQ ID NO: 1051 - protein, 16 aa, Artificial Sequence
  source: /note="Description of Artificial Sequence: Synthetic peptide"
  MOD_RES (1)..(1): Citrulline
  MOD_RES (3)..(3): Citrulline
XLXGQLKQWLDLHLHQ

SEQ ID NO: 1052 - protein, 16 aa, Artificial Sequence
  source: /note="Description of Artificial Sequence: Synthetic peptide"
  MOD_RES (6)..(6): Citrulline
  MOD_RES (8)..(8): Citrulline
FEGQQXLXGAHAEPYG

SEQ ID NO: 1053 - protein, 16 aa, Artificial Sequence
  source: /note="Description of Artificial Sequence: Synthetic peptide"
  MOD_RES (2)..(2): Citrulline
  MOD_RES (4)..(4): Citrulline
QXLXGAHAEPYGASPG

SEQ ID NO: 1054 - protein, 16 aa, Artificial Sequence
  source: /note="Description of Artificial Sequence: Synthetic peptide"
  MOD_RES (10)..(10): Citrulline
MGSNQITFGXGSSQPN

SEQ ID NO: 1055 - protein, 16 aa, Artificial Sequence
  source: /note="Description of Artificial Sequence: Synthetic peptide"
  MOD_RES (6)..(6): Citrulline
QITFGXGSSQPNLSTS

SEQ ID NO: 1056 - protein, 16 aa, Artificial Sequence
  source: /note="Description of Artificial Sequence: Synthetic peptide"
  MOD_RES (2)..(2): Citrulline
GXGSSQPNLSTSHSEQ

SEQ ID NO: 1057 - protein, 16 aa, Artificial Sequence
  source: /note="Description of Artificial Sequence: Synthetic peptide"
  MOD_RES (10)..(10): Citrulline
  MOD_RES (14)..(14): Citrulline
IDIYQQEGTXGLWXGV

SEQ ID NO: 1058 - protein, 16 aa, Artificial Sequence
  source: /note="Description of Artificial Sequence: Synthetic peptide"
  MOD_RES (6)..(6): Citrulline
  MOD_RES (10)..(10): Citrulline
QQEGTXGLWXGVVPTA

SEQ ID NO: 1059 - protein, 16 aa, Artificial Sequence
  source: /note="Description of Artificial Sequence: Synthetic peptide"
  MOD_RES (6)..(6): Citrulline
ALTSSXGVLQQLAPSV

SEQ ID NO: 1060 - protein, 16 aa, Artificial Sequence
  source: /note="Description of Artificial Sequence: Synthetic peptide"
  MOD_RES (2)..(2): Citrulline
SXGVLQQLAPSVQKGE

SEQ ID NO: 1061 - protein, 16 aa, Artificial Sequence
  source: /note="Description of Artificial Sequence: Synthetic peptide"
  MOD_RES (7)..(7): Citrulline
  MOD_RES (11)..(11): Citrulline
DQGITLXKLVXGATLD

SEQ ID NO: 1062 - protein, 16 aa, Artificial Sequence
  source: /note="Description of Artificial Sequence: Synthetic peptide"
  MOD_RES (3)..(3): Citrulline
  MOD_RES (7)..(7): Citrulline
TLXKLVXGATLDIVDG

SEQ ID NO: 1063 - protein, 16 aa, Artificial Sequence
  source: /note="Description of Artificial Sequence: Synthetic peptide"
  MOD_RES (3)..(3): Citrulline
LVXGATLDIVDGMAQL

SEQ ID NO: 1064 - protein, 16 aa, Artificial Sequence
  source: /note="Description of Artificial Sequence: Synthetic peptide"
  MOD_RES (13)..(13): Citrulline
ETNVGSQGSQLSXGEK

SEQ ID NO: 1065 - protein, 16 aa, Artificial Sequence
  source: /note="Description of Artificial Sequence: Synthetic peptide"
  MOD_RES (9)..(9): Citrulline
  MOD_RES (14)..(14): Citrulline
GSQGSQLSXGEKQXIA

SEQ ID NO: 1066 - protein, 16 aa, Artificial Sequence
  source: /note="Description of Artificial Sequence: Synthetic peptide"
  MOD_RES (11)..(11): Citrulline
  MOD_RES (13)..(13): Citrulline
WQDPLAVALSXGXQLA

SEQ ID NO: 1067 - protein, 16 aa, Artificial Sequence
  source: /note="Description of Artificial Sequence: Synthetic peptide"
  MOD_RES (7)..(7): Citrulline
  MOD_RES (9)..(9): Citrulline
LAVALSXGXQLAAPPG

SEQ ID NO: 1068 - protein, 16 aa, Artificial Sequence
  source: /note="Description of Artificial Sequence: Synthetic peptide"
  MOD_RES (12)..(12): Citrulline
KQFSSSGEWYKXGVKE

SEQ ID NO: 1069 - protein, 16 aa, Artificial Sequence
  source: /note="Description of Artificial Sequence: Synthetic peptide"
  MOD_RES (8)..(8): Citrulline
SSGEWYKXGVKENSII

SEQ ID NO: 1070 - protein, 16 aa, Artificial Sequence
  source: /note="Description of Artificial Sequence: Synthetic peptide"
  MOD_RES (9)..(9): Citrulline
  MOD_RES (13)..(13): Citrulline
SSTNIFNPXGNLXKFQ

SEQ ID NO: 1071 - protein, 16 aa, Artificial Sequence
  source: /note="Description of Artificial Sequence: Synthetic peptide"
  MOD_RES (5)..(5): Citrulline
  MOD_RES (9)..(9): Citrulline
IFNPXGNLXKFQDFSG

SEQ ID NO: 1072 - protein, 16 aa, Artificial Sequence
  source: /note="Description of Artificial Sequence: Synthetic peptide"
  MOD_RES (7)..(7): Citrulline
  MOD_RES (9)..(9): Citrulline
QPPISWXVXGGGPAET

SEQ ID NO: 1073 - protein, 16 aa, Artificial Sequence
  source: /note="Description of Artificial Sequence: Synthetic peptide"
  MOD_RES (13)..(13): Citrulline
VKQAVLAVEYMEXGTM

SEQ ID NO: 1074 - protein, 16 aa, Artificial Sequence
  source: /note="Description of Artificial Sequence: Synthetic peptide"
  MOD_RES (9)..(9): Citrulline
VLAVEYMEXGTMTGLA

SEQ ID NO: 1075 - protein, 16 aa, Artificial Sequence
  source: /note="Description of Artificial Sequence: Synthetic peptide"
  MOD_RES (5)..(5): Citrulline
  MOD_RES (14)..(14): Citrulline
EYMEXGTMTGLALXHM

SEQ ID NO: 1076 - protein, 16 aa, Artificial Sequence
  source: /note="Description of Artificial Sequence: Synthetic peptide"
  MOD_RES (11)..(11): Citrulline
KMLTGDTTVTXGDAFL

SEQ ID NO: 1077 - protein, 16 aa, Artificial Sequence
  source: /note="Description of Artificial Sequence: Synthetic peptide"
  MOD_RES (7)..(7): Citrulline
GDTTVTXGDAFLNKNS

SEQ ID NO: 1078 - protein, 16 aa, Artificial Sequence
  source: /note="Description of Artificial Sequence: Synthetic peptide"
  MOD_RES (3)..(3): Citrulline
VTXGDAFLNKNSILSN

SEQ ID NO: 1079 - protein, 16 aa, Artificial Sequence
  source: /note="Description of Artificial Sequence: Synthetic peptide"
  MOD_RES (9)..(9): Citrulline
  MOD_RES (13)..(13): Citrulline
KLQVFQALXGLQXGSA

SEQ ID NO: 1080 - protein, 16 aa, Artificial Sequence
  source: /note="Description of Artificial Sequence: Synthetic peptide"
  MOD_RES (5)..(5): Citrulline
  MOD_RES (9)..(9): Citrulline
FQALXGLQXGSAVVGQ

SEQ ID NO: 1081 - protein, 16 aa, Artificial Sequence
  source: /note="Description of Artificial Sequence: Synthetic peptide"
  MOD_RES (1)..(1): Citrulline
  MOD_RES (5)..(5): Citrulline
XGLQXGSAVVGQYQSY

SEQ ID NO: 1082 - protein, 16 aa, Artificial Sequence
  source: /note="Description of Artificial Sequence: Synthetic peptide"
  MOD_RES (7)..(7): Citrulline
  MOD_RES (10)..(10): Citrulline
DYIYNTXLNXGEYVDV

SEQ ID NO: 1083 - protein, 16 aa, Artificial Sequence
  source: /note="Description of Artificial Sequence: Synthetic peptide"
  MOD_RES (3)..(3): Citrulline
  MOD_RES (6)..(6): Citrulline
NTXLNXGEYVDVPFPN

SEQ ID NO: 1084 - protein, 16 aa, Artificial Sequence
  source: /note="Description of Artificial Sequence: Synthetic peptide"
  MOD_RES (6)..(6): Citrulline
  MOD_RES (13)..(13): Citrulline
GMMVEXPCPKGTXGTA

SEQ ID NO: 1085 - protein, 16 aa, Artificial Sequence
  source: /note="Description of Artificial Sequence: Synthetic peptide"
  MOD_RES (2)..(2): Citrulline
  MOD_RES (9)..(9): Citrulline
EXPCPKGTXGTASYLC

SEQ ID NO: 1086 - protein, 16 aa, Artificial Sequence
  source: /note="Description of Artificial Sequence: Synthetic peptide"
  MOD_RES (9)..(9): Citrulline
SELVHNNLXGSSKTHN

SEQ ID NO: 1087 - protein, 16 aa, Artificial Sequence
  source: /note="Description of Artificial Sequence: Synthetic peptide"
  MOD_RES (5)..(5): Citrulline
HNNLXGSSKTHNLELT

SEQ ID NO: 1088 - protein, 16 aa, Artificial Sequence
  source: /note="Description of Artificial Sequence: Synthetic peptide"
  MOD_RES (13)..(13): Citrulline
EGGYFNTDKPHPXGEI

SEQ ID NO: 1089 - protein, 16 aa, Artificial Sequence
  source: /note="Description of Artificial Sequence: Synthetic peptide"
  MOD_RES (9)..(9): Citrulline
FNTDKPHPXGEILIGG

SEQ ID NO: 1090 - protein, 16 aa, Artificial Sequence
  source: /note="Description of Artificial Sequence: Synthetic peptide"
  MOD_RES (5)..(5): Citrulline
KPHPXGEILIGGQSVT

SEQ ID NO: 1091 - protein, 16 aa, Artificial Sequence
  source: /note="Description of Artificial Sequence: Synthetic peptide"
  MOD_RES (12)..(12): Citrulline
SELLCSQAGGPXGQAL

SEQ ID NO: 1092 - protein, 16 aa, Artificial Sequence
  source: /note="Description of Artificial Sequence: Synthetic peptide"
  MOD_RES (8)..(8): Citrulline
CSQAGGPXGQALQGEL

SEQ ID NO: 1093 - protein, 16 aa, Artificial Sequence
  source: /note="Description of Artificial Sequence: Synthetic peptide"
  MOD_RES (9)..(9): Citrulline
GTDGVMVAXGLLANPA

SEQ ID NO: 1094 - protein, 16 aa, Artificial Sequence
  source: /note="Description of Artificial Sequence: Synthetic peptide"
  MOD_RES (5)..(5): Citrulline
VMVAXGLLANPAMFAG

SEQ ID NO: 1095 - protein, 16 aa, Artificial Sequence
  source: /note="Description of Artificial Sequence: Synthetic peptide"
  MOD_RES (11)..(11): Citrulline
PLGPAAAVFGXGETLG

SEQ ID NO: 1096 - protein, 16 aa, Artificial Sequence
  source: /note="Description of Artificial Sequence: Synthetic peptide"
  MOD_RES (3)..(3): Citrulline
  MOD_RES (12)..(12): Citrulline
FGXGETLGPAPXAGGT

SEQ ID NO: 1097 - protein, 16 aa, Artificial Sequence
  source: /note="Description of Artificial Sequence: Synthetic peptide"
  MOD_RES (3)..(3): Citrulline
  MOD_RES (12)..(12): Citrulline
HHXAHYETEGSXGAVK

SEQ ID NO: 1098 - protein, 16 aa, Artificial Sequence
  source: /note="Description of Artificial Sequence: Synthetic peptide"
  MOD_RES (8)..(8): Citrulline
HYETEGSXGAVKASAG

SEQ ID NO: 1099 - protein, 16 aa, Artificial Sequence
  source: /note="Description of Artificial Sequence: Synthetic peptide"
  MOD_RES (4)..(4): Citrulline
EGSXGAVKASAGGHPI

SEQ ID NO: 1100 - protein, 16 aa, Artificial Sequence
  source: /note="Description of Artificial Sequence: Synthetic peptide"
  MOD_RES (6)..(6): Citrulline
  MOD_RES (13)..(13): Citrulline
VKYVSXCGAGGAXGAS

SEQ ID NO: 1101 - protein, 16 aa, Artificial Sequence
  source: /note="Description of Artificial Sequence: Synthetic peptide"
  MOD_RES (2)..(2): Citrulline
  MOD_RES (9)..(9): Citrulline
SXCGAGGAXGASLPPG

SEQ ID NO: 1102 - protein, 16 aa, Artificial Sequence
  source: /note="Description of Artificial Sequence: Synthetic peptide"
  MOD_RES (5)..(5): Citrulline
AGGAXGASLPPGFPLG

SEQ ID NO: 1103 - protein, 16 aa, Artificial Sequence
  source: /note="Description of Artificial Sequence: Synthetic peptide"
  MOD_RES (11)..(11): Citrulline
WGDGDYGKLGXGGSDG

SEQ ID NO: 1104 - protein, 16 aa, Artificial Sequence
  source: /note="Description of Artificial Sequence: Synthetic peptide"
  MOD_RES (7)..(7): Citrulline
DYGKLGXGGSDGCKTP

SEQ ID NO: 1105 - protein, 16 aa, Artificial Sequence
  source: /note="Description of Artificial Sequence: Synthetic peptide"
  MOD_RES (3)..(3): Citrulline
LGXGGSDGCKTPKLIE

SEQ ID NO: 1106 - protein, 16 aa, Artificial Sequence
  source: /note="Description of Artificial Sequence: Synthetic peptide"
  MOD_RES (8)..(8): Citrulline
  MOD_RES (11)..(11): Citrulline
AMMKIGTXVMXGVDWK

SEQ ID NO: 1107 - protein, 16 aa, Artificial Sequence
  source: /note="Description of Artificial Sequence: Synthetic peptide"
  MOD_RES (4)..(4): Citrulline
  MOD_RES (7)..(7): Citrulline
IGTXVMXGVDWKWGDQ

SEQ ID NO: 1108 - protein, 16 aa, Artificial Sequence
  source: /note="Description of Artificial Sequence: Synthetic peptide"
  MOD_RES (3)..(3): Citrulline
VMXGVDWKWGDQDGPP

SEQ ID NO: 1109 - protein, 16 aa, Artificial Sequence
  source: /note="Description of Artificial Sequence: Synthetic peptide"
  MOD_RES (2)..(2): Citrulline
  MOD_RES (12)..(12): Citrulline
QXQFEYEDPIVXGGKQ

SEQ ID NO: 1110 - protein, 16 aa, Artificial Sequence
  source: /note="Description of Artificial Sequence: Synthetic peptide"
  MOD_RES (7)..(7): Citrulline
DYGKLGXGGSDGCKVP

SEQ ID NO: 1111 - protein, 16 aa, Artificial Sequence
  source: /note="Description of Artificial Sequence: Synthetic peptide"
  MOD_RES (14)..(14): Citrulline
DGKIIKKTPYPHPXGT

SEQ ID NO: 1112 - protein, 16 aa, Artificial Sequence
  source: /note="Description of Artificial Sequence: Synthetic peptide"
  MOD_RES (10)..(10): Citrulline
IKKTPYPHPXGTTVSV

SEQ ID NO: 1113 - protein, 16 aa, Artificial Sequence
  source: /note="Description of Artificial Sequence: Synthetic peptide"
  MOD_RES (14)..(14): Citrulline
GGGNTSAVSPSSIXGS

SEQ ID NO: 1114 - protein, 16 aa, Artificial Sequence
  source: /note="Description of Artificial Sequence: Synthetic peptide"
  MOD_RES (10)..(10): Citrulline
TSAVSPSSIXGSAAAS

SEQ ID NO: 1115 - protein, 16 aa, Artificial Sequence
  source: /note="Description of Artificial Sequence: Synthetic peptide"
  MOD_RES (6)..(6): Citrulline
SPSSIXGSAAASLQPL

SEQ ID NO: 1116 - protein, 16 aa, Artificial Sequence
  source: /note="Description of Artificial Sequence: Synthetic peptide"
  MOD_RES (6)..(6): Citrulline
QHVQTXGYTKSPNQLV

SEQ ID NO: 1117 - protein, 16 aa, Artificial Sequence
  source: /note="Description of Artificial Sequence: Synthetic peptide"
  MOD_RES (10)..(10): Citrulline
  MOD_RES (12)..(12): Citrulline
EDGSVKMFLXGXPVPM

SEQ ID NO: 1118 - protein, 16 aa, Artificial Sequence
  source: /note="Description of Artificial Sequence: Synthetic peptide"
  MOD_RES (6)..(6): Citrulline
  MOD_RES (8)..(8): Citrulline
VKMFLXGXPVPMMIPD

SEQ ID NO: 1119 - protein, 16 aa, Artificial Sequence
  source: /note="Description of Artificial Sequence: Synthetic peptide"
  MOD_RES (2)..(2): Citrulline
  MOD_RES (4)..(4): Citrulline
LXGXPVPMMIPDELAP

SEQ ID NO: 1120 - protein, 16 aa, Artificial Sequence
  source: /note="Description of Artificial Sequence: Synthetic peptide"
  MOD_RES (8)..(8): Citrulline
  MOD_RES (15)..(15): Citrulline
VTPPPPPXGQTPPPXG

SEQ ID NO: 1121 - protein, 16 aa, Artificial Sequence
  source: /note="Description of Artificial Sequence: Synthetic peptide"
  MOD_RES (4)..(4): Citrulline
  MOD_RES (11)..(11): Citrulline
PPPXGQTPPPXGTTPP

SEQ ID NO: 1122 - protein, 16 aa, Artificial Sequence
  source: /note="Description of Artificial Sequence: Synthetic peptide"
  MOD_RES (7)..(7): Citrulline
GQTPPPXGTTPPPPSW

SEQ ID NO: 1123 - protein, 16 aa, Artificial Sequence
  source: /note="Description of Artificial Sequence: Synthetic peptide"
  MOD_RES (7)..(7): Citrulline
  MOD_RES (12)..(12): Citrulline
MKLGSSXAGPGXGSAG

SEQ ID NO: 1124 - protein, 16 aa, Artificial Sequence
  source: /note="Description of Artificial Sequence: Synthetic peptide"
  MOD_RES (3)..(3): Citrulline
  MOD_RES (8)..(8): Citrulline
SSXAGPGXGSAGLLPG

SEQ ID NO: 1125 - protein, 16 aa, Artificial Sequence
  source: /note="Description of Artificial Sequence: Synthetic peptide"
  MOD_RES (4)..(4): Citrulline
GPGXGSAGLLPGVHEL

SEQ ID NO: 1126 - protein, 16 aa, Artificial Sequence
  source: /note="Description of Artificial Sequence: Synthetic peptide"
  MOD_RES (7)..(7): Citrulline
  MOD_RES (10)..(10): Citrulline
PQQDHAXWPXGSSLSE

SEQ ID NO: 1127 - protein, 16 aa, Artificial Sequence
  source: /note="Description of Artificial Sequence: Synthetic peptide"
  MOD_RES (3)..(3): Citrulline
  MOD_RES (6)..(6): Citrulline
HAXWPXGSSLSECSEG

SEQ ID NO: 1128 - protein, 16 aa, Artificial Sequence
  source: /note="Description of Artificial Sequence: Synthetic peptide"
  MOD_RES (11)..(11): Citrulline
FVGLSKWTNHXGAEIV

SEQ ID NO: 1129 - protein, 16 aa, Artificial Sequence
  source: /note="Description of Artificial Sequence: Synthetic peptide"
  MOD_RES (7)..(7): Citrulline
SKWTNHXGAEIVADTF

SEQ ID NO: 1130 - protein, 16 aa, Artificial Sequence
  source: /note="Description of Artificial Sequence: Synthetic peptide"
  MOD_RES (5)..(5): Citrulline
FLLHXGGGDLPNSQEA

SEQ ID NO: 1131 - protein, 16 aa, Artificial Sequence
  source: /note="Description of Artificial Sequence: Synthetic peptide"
  MOD_RES (11)..(11): Citrulline
NAHLTKDYTVXGLLGK

SEQ ID NO: 1132 - protein, 16 aa, Artificial Sequence
  source: /note="Description of Artificial Sequence: Synthetic peptide"
  MOD_RES (7)..(7): Citrulline
TKDYTVXGLLGKATDD

SEQ ID NO: 1133 - protein, 16 aa, Artificial Sequence
  source: /note="Description of Artificial Sequence: Synthetic peptide"
  MOD_RES (7)..(7): Citrulline
  MOD_RES (11)..(11): Citrulline
AYEMAVXGLIXPMNKS

SEQ ID NO: 1134 - protein, 16 aa, Artificial Sequence
  source: /note="Description of Artificial Sequence: Synthetic peptide"
  MOD_RES (3)..(3): Citrulline
  MOD_RES (7)..(7): Citrulline
AVXGLIXPMNKSPMLI

SEQ ID NO: 1135 - protein, 16 aa, Artificial Sequence
  source: /note="Description of Artificial Sequence: Synthetic peptide"
  MOD_RES (10)..(10): Citrulline
  MOD_RES (15)..(15): Citrulline
FPAMAGWGGXGSYQXK

SEQ ID NO: 1136 - protein, 16 aa, Artificial Sequence
  source: /note="Description of Artificial Sequence: Synthetic peptide"
  MOD_RES (6)..(6): Citrulline
  MOD_RES (11)..(11): Citrulline
AGWGGXGSYQXKMAAG

SEQ ID NO: 1137 - protein, 16 aa, Artificial Sequence
  source: /note="Description of Artificial Sequence: Synthetic peptide"
  MOD_RES (2)..(2): Citrulline
  MOD_RES (7)..(7): Citrulline
GXGSYQXKMAAGLPWT

SEQ ID NO: 1138 - protein, 16 aa, Artificial Sequence
  source: /note="Description of Artificial Sequence: Synthetic peptide"
  MOD_RES (8)..(8): Citrulline
  MOD_RES (15)..(15): Citrulline
HHTAMLTXGEQHLSXG

SEQ ID NO: 1139 - protein, 16 aa, Artificial Sequence
  source: /note="Description of Artificial Sequence: Synthetic peptide"
  MOD_RES (4)..(4): Citrulline
  MOD_RES (11)..(11): Citrulline
MLTXGEQHLSXGLGTP

SEQ ID NO: 1140 - protein, 16 aa, Artificial Sequence
  source: /note="Description of Artificial Sequence: Synthetic peptide"
  MOD_RES (6)..(6): Citrulline
  MOD_RES (10)..(10): Citrulline
FQDIQXMPSXGSMVFQ

SEQ ID NO: 1141 - protein, 16 aa, Artificial Sequence
  source: /note="Description of Artificial Sequence: Synthetic peptide"
  MOD_RES (2)..(2): Citrulline
  MOD_RES (6)..(6): Citrulline
QXMPSXGSMVFQPLQI

SEQ ID NO: 1142 - protein, 16 aa, Artificial Sequence
  source: /note="Description of Artificial Sequence: Synthetic peptide"
  MOD_RES (2)..(2): Citrulline
SXGSMVFQPLQINNYQ

SEQ ID NO: 1143 - protein, 16 aa, Artificial Sequence
  source: /note="Description of Artificial Sequence: Synthetic peptide"
  MOD_RES (11)..(11): Citrulline
LQIKPCHSKSXGSIIC

SEQ ID NO: 1144 - protein, 16 aa, Artificial Sequence
  source: /note="Description of Artificial Sequence: Synthetic peptide"
  MOD_RES (7)..(7): Citrulline
PCHSKSXGSIICKSDC

SEQ ID NO: 1145 - protein, 16 aa, Artificial Sequence
  source: /note="Description of Artificial Sequence: Synthetic peptide"
  MOD_RES (3)..(3): Citrulline
KSXGSIICKSDCVEIL

SEQ ID NO: 1146 - protein, 16 aa, Artificial Sequence
  source: /note="Description of Artificial Sequence: Synthetic peptide"
  MOD_RES (2)..(2): Citrulline
  MOD_RES (11)..(11): Citrulline
PXSPAGPEKPXGTQKT

SEQ ID NO: 1147 - protein, 16 aa, Artificial Sequence
  source: /note="Description of Artificial Sequence: Synthetic peptide"
  MOD_RES (7)..(7): Citrulline
AGPEKPXGTQKTTPGV

SEQ ID NO: 1148 - protein, 16 aa, Artificial Sequence
  source: /note="Description of Artificial Sequence: Synthetic peptide"
  MOD_RES (4)..(4): Citrulline
  MOD_RES (8)..(8): Citrulline
PECXEEKXGSLHVWKS

SEQ ID NO: 1149 - protein, 16 aa, Artificial Sequence
  source: /note="Description of Artificial Sequence: Synthetic peptide"
  MOD_RES (4)..(4): Citrulline
EEKXGSLHVWKSELVE

SEQ ID NO: 1150 - protein, 16 aa, Artificial Sequence
  source: /note="Description of Artificial Sequence: Synthetic peptide"
  MOD_RES (13)..(13): Citrulline
SNYCLKNDLGNPXGTL

SEQ ID NO: 1151 - protein, 16 aa, Artificial Sequence
  source: /note="Description of Artificial Sequence: Synthetic peptide"
  MOD_RES (9)..(9): Citrulline
LKNDLGNPXGTLQDGT

SEQ ID NO: 1152 - protein, 16 aa, Artificial Sequence
  source: /note="Description of Artificial Sequence: Synthetic peptide"
  MOD_RES (11)..(11): Citrulline
SLDGKKWQTYXGNSTG

SEQ ID NO: 1153 - protein, 16 aa, Artificial Sequence
  source: /note="Description of Artificial Sequence: Synthetic peptide"
  MOD_RES (7)..(7): Citrulline
KKWQTYXGNSTGTLMV

SEQ ID NO: 1154 - protein, 16 aa, Artificial Sequence
  source: /note="Description of Artificial Sequence: Synthetic peptide"
  MOD_RES (1)..(1): Citrulline
  MOD_RES (9)..(9): Citrulline
XAQMDLSGXGNPIKVS

SEQ ID NO: 1155 - protein, 16 aa, Artificial Sequence
  source: /note="Description of Artificial Sequence: Synthetic peptide"
  MOD_RES (5)..(5): Citrulline
  MOD_RES (13)..(13): Citrulline
DLSGXGNPIKVSXVGS

SEQ ID NO: 1156 - protein, 16 aa, Artificial Sequence
  source: /note="Description of Artificial Sequence: Synthetic peptide"
  MOD_RES (1)..(1): Citrulline
  MOD_RES (9)..(9): Citrulline
XGNPIKVSXVGSAMVN

SEQ ID NO: 1157 - protein, 16 aa, Artificial Sequence
  source: /note="Description of Artificial Sequence: Synthetic peptide"
  MOD_RES (8)..(8): Citrulline
ELGKQGVXGAVSTLLQ

SEQ ID NO: 1158 - protein, 16 aa, Artificial Sequence
  source: /note="Description of Artificial Sequence: Synthetic peptide"
  MOD_RES (4)..(4): Citrulline
QGVXGAVSTLLQAPEL

SEQ ID NO: 1159 - protein, 16 aa, Artificial Sequence
  source: /note="Description of Artificial Sequence: Synthetic peptide"
  MOD_RES (3)..(3): Citrulline
  MOD_RES (9)..(9): Citrulline
ENXSDQVTXGTVTPPP

SEQ ID NO: 1160 - protein, 16 aa, Artificial Sequence
  source: /note="Description of Artificial Sequence: Synthetic peptide"
  MOD_RES (5)..(5): Citrulline
  MOD_RES (13)..(13): Citrulline
DQVTXGTVTPPPXLVK

SEQ ID NO: 1161 - protein, 16 aa, Artificial Sequence
  source: /note="Description of Artificial Sequence: Synthetic peptide"
  MOD_RES (11)..(11): Citrulline
  MOD_RES (13)..(13): Citrulline
LHAFENLEIIXGXTKQ

SEQ ID NO: 1162 - protein, 16 aa, Artificial Sequence
  source: /note="Description of Artificial Sequence: Synthetic peptide"
  MOD_RES (7)..(7): Citrulline
  MOD_RES (9)..(9): Citrulline
ENLEIIXGXTKQHGQF

SEQ ID NO: 1163 - protein, 16 aa, Artificial Sequence
  source: /note="Description of Artificial Sequence: Synthetic peptide"
  MOD_RES (10)..(10): Citrulline
GVFEWEAFAXGTKALM

SEQ ID NO: 1164 - protein, 16 aa, Artificial Sequence
  source: /note="Description of Artificial Sequence: Synthetic peptide"
  MOD_RES (6)..(6): Citrulline
WEAFAXGTKALMDEVV

SEQ ID NO: 1165 - protein, 16 aa, Artificial Sequence
  source: /note="Description of Artificial Sequence: Synthetic peptide"
  MOD_RES (9)..(9): Citrulline
SEVSSGSAXGKKLSEI

SEQ ID NO: 1166 - protein, 16 aa, Artificial Sequence
  source: /note="Description of Artificial Sequence: Synthetic peptide"
  MOD_RES (5)..(5): Citrulline
SGSAXGKKLSEIMEKG

SEQ ID NO: 1167 - protein, 16 aa, Artificial Sequence
  source: /note="Description of Artificial Sequence: Synthetic peptide"
  MOD_RES (11)..(11): Citrulline
  MOD_RES (15)..(15): Citrulline
TEPVIAFYEKXGIVXK

SEQ ID NO: 1168 - protein, 16 aa, Artificial Sequence
  source: /note="Description of Artificial Sequence: Synthetic peptide"
  MOD_RES (7)..(7): Citrulline
  MOD_RES (11)..(11): Citrulline
IAFYEKXGIVXKVNAE

SEQ ID NO: 1169 - protein, 16 aa, Artificial Sequence
  source: /note="Description of Artificial Sequence: Synthetic peptide"
  MOD_RES (10)..(10): Citrulline
CYHGDGQSYXGTSSTT

SEQ ID NO: 1170 - protein, 16 aa, Artificial Sequence
  source: /note="Description of Artificial Sequence: Synthetic peptide"
  MOD_RES (10)..(10): Citrulline
  MOD_RES (13)..(13): Citrulline
CMFGNGKGYXGKXATT

SEQ ID NO: 1171 - protein, 16 aa, Artificial Sequence
  source: /note="Description of Artificial Sequence: Synthetic peptide"
  MOD_RES (6)..(6): Citrulline
  MOD_RES (9)..(9): Citrulline
NGKGYXGKXATTVTGT

SEQ ID NO: 1172 - protein, 16 aa, Artificial Sequence
  source: /note="Description of Artificial Sequence: Synthetic peptide"
  MOD_RES (11)..(11): Citrulline
TCYEGNGHFYXGKAST

SEQ ID NO: 1173 - protein, 16 aa, Artificial Sequence
  source: /note="Description of Artificial Sequence: Synthetic peptide"
  MOD_RES (7)..(7): Citrulline
GNGHFYXGKASTDTMG

SEQ ID NO: 1174 - protein, 16 aa, Artificial Sequence
  source: /note="Description of Artificial Sequence: Synthetic peptide"
  MOD_RES (10)..(10): Citrulline
TLTGIVSWGXGCALKD

SEQ ID NO: 1175 - protein, 16 aa, Artificial Sequence
  source: /note="Description of Artificial Sequence: Synthetic peptide"
  MOD_RES (6)..(6): Citrulline
IVSWGXGCALKDKPGV

SEQ ID NO: 1176 - protein, 16 aa, Artificial Sequence
  source: /note="Description of Artificial Sequence: Synthetic peptide"
  MOD_RES (10)..(10): Citrulline
  MOD_RES (15)..(15): Citrulline
FHCYDGYTLXGSANXT

SEQ ID NO: 1177 - protein, 16 aa, Artificial Sequence
  source: /note="Description of Artificial Sequence: Synthetic peptide"
  MOD_RES (6)..(6): Citrulline
  MOD_RES (11)..(11): Citrulline
DGYTLXGSANXTCQVN

SEQ ID NO: 1178 - protein, 16 aa, Artificial Sequence
  source: /note="Description of Artificial Sequence: Synthetic peptide"
  MOD_RES (6)..(6): Citrulline
VYAWEXGSMKTHFNTA

SEQ ID NO: 1179 - protein, 16 aa, Artificial Sequence
  source: /note="Description of Artificial Sequence: Synthetic peptide"
  MOD_RES (9)..(9): Citrulline
NDYVKNGTXGKITDLI

SEQ ID NO: 1180 - protein, 16 aa, Artificial Sequence
  source: /note="Description of Artificial Sequence: Synthetic peptide"
  MOD_RES (5)..(5): Citrulline
KNGTXGKITDLIKDLD

SEQ ID NO: 1181 - protein, 16 aa, Artificial Sequence
  source: /note="Description of Artificial Sequence: Synthetic peptide"
  MOD_RES (10)..(10): Citrulline
VDSAVYGVQXGAKKPL

SEQ ID NO: 1182 - protein, 16 aa, Artificial Sequence
  source: /note="Description of Artificial Sequence: Synthetic peptide"
  MOD_RES (6)..(6): Citrulline
  MOD_RES (14)..(14): Citrulline
VYGVQXGAKKPLEXVF

SEQ ID NO: 1183 - protein, 16 aa, Artificial Sequence
  source: /note="Description of Artificial Sequence: Synthetic peptide"
  MOD_RES (11)..(11): Citrulline
LEMNIPYSVVXGEQIQ

SEQ ID NO: 1184 - protein, 16 aa, Artificial Sequence
  source: /note="Description of Artificial Sequence: Synthetic peptide"
  MOD_RES (7)..(7): Citrulline
IPYSVVXGEQIQLKGT

SEQ ID NO: 1185 - protein, 16 aa, Artificial Sequence
  source: /note="Description of Artificial Sequence: Synthetic peptide"
  MOD_RES (11)..(12): Citrulline
QVDINGFTTGXXGDLA

SEQ ID NO: 1186 - protein, 16 aa, Artificial Sequence
  source: /note="Description of Artificial Sequence: Synthetic peptide"
  MOD_RES (7)..(8): Citrulline
NGFTTGXXGDLATIHG

SEQ ID NO: 1187 - protein, 16 aa, Artificial Sequence
  source: /note="Description of Artificial Sequence: Synthetic peptide"
  MOD_RES (11)..(11): Citrulline
  MOD_RES (15)..(15): Citrulline
SSACYFQNCPXGGKXA

SEQ ID NO: 1188 - protein, 16 aa, Artificial Sequence
  source: /note="Description of Artificial Sequence: Synthetic peptide"
  MOD_RES (7)..(7): Citrulline
  MOD_RES (11)..(11): Citrulline
YFQNCPXGGKXAMSDL

SEQ ID NO: 1189 - protein, 16 aa, Artificial Sequence
  source: /note="Description of Artificial Sequence: Synthetic peptide"
  MOD_RES (10)..(10): Citrulline
EKLEKEDFTXGKLMSS

SEQ ID NO: 1190 - protein, 16 aa, Artificial Sequence
  source: /note="Description of Artificial Sequence: Synthetic peptide"
  MOD_RES (6)..(6): Citrulline
KEDFTXGKLMSSLHLK

SEQ ID NO: 1191 - protein, 16 aa, Artificial Sequence
  source: /note="Description of Artificial Sequence: Synthetic peptide"
  MOD_RES (13)..(13): Citrulline
NPTSGCSWLFQPXGAA

SEQ ID NO: 1192 - protein, 16 aa, Artificial Sequence
  source: /note="Description of Artificial Sequence: Synthetic peptide"
  MOD_RES (9)..(9): Citrulline
GCSWLFQPXGAAASPT

SEQ ID NO: 1193 - protein, 16 aa, Artificial Sequence
  source: /note="Description of Artificial Sequence: Synthetic peptide"
  MOD_RES (14)..(14): Citrulline
SWKYKNNSDISSTXGF

SEQ ID NO: 1194 - protein, 16 aa, Artificial Sequence
  source: /note="Description of Artificial Sequence: Synthetic peptide"
  MOD_RES (10)..(10): Citrulline
KNNSDISSTXGFPSVL

SEQ ID NO: 1195 - protein, 15 aa, Artificial Sequence
  source: /note="Description of Artificial Sequence: Synthetic peptide"
  MOD_RES (6)..(6): Citrulline
  MOD_RES (13)..(13): Citrulline
DISSTXGFPSVLXGG

SEQ ID NO: 1196 - protein, 16 aa, Artificial Sequence
  source: /note="Description of Artificial Sequence: Synthetic peptide"
  MOD_RES (2)..(2): Citrulline
  MOD_RES (9)..(9): Citrulline
TXGFPSVLXGGKYAAT

SEQ ID NO: 1197 - protein, 16 aa, Artificial Sequence
  source: /note="Description of Artificial Sequence: Synthetic peptide"
  MOD_RES (8)..(8): Citrulline
VFVQWMQXGQPLSPEK

SEQ ID NO: 1198 - protein, 16 aa, Artificial Sequence
  source: /note="Description of Artificial Sequence: Synthetic peptide"
  MOD_RES (4)..(4): Citrulline
WMQXGQPLSPEKYVTS

SEQ ID NO: 1199 - protein, 16 aa, Artificial Sequence
  source: /note="Description of Artificial Sequence: Synthetic peptide"
  MOD_RES (1)..(1): Citrulline
  MOD_RES (13)..(13): Citrulline
XGVQGPPGPAGPXGAN

SEQ ID NO: 1200 - protein, 16 aa, Artificial Sequence
  source: /note="Description of Artificial Sequence: Synthetic peptide"
  MOD_RES (3)..(3): Citrulline
  MOD_RES (15)..(15): Citrulline
GEXGSPGAQGLQGPXG

SEQ ID NO: 1201 - protein, 16 aa, Artificial Sequence
  source: /note="Description of Artificial Sequence: Synthetic peptide"
  MOD_RES (7)..(7): Citrulline
TGPKGAXGAQGPPGAT

SEQ ID NO: 1202 - protein, 16 aa, Artificial Sequence
  source: /note="Description of Artificial Sequence: Synthetic peptide"
  MOD_RES (3)..(3): Citrulline
GAXGAQGPPGATGFPG

SEQ ID NO: 1203 - protein, 16 aa, Artificial Sequence
  source: /note="Description of Artificial Sequence: Synthetic peptide"
  MOD_RES (6)..(6): Citrulline
  MOD_RES (15)..(15): Citrulline
GPAGAXGIQGPQGPXG

SEQ ID NO: 1204 - protein, 16 aa, Artificial Sequence
  source: /note="Description of Artificial Sequence: Synthetic peptide"
  MOD_RES (2)..(2): Citrulline
  MOD_RES (11)..(11): Citrulline
AXGIQGPQGPXGDKGE

SEQ ID NO: 1205 - protein, 16 aa, Artificial Sequence
  source: /note="Description of Artificial Sequence: Synthetic peptide"
  MOD_RES (8)..(8): Citrulline
PPGMPGPXGSPGPQGV

SEQ ID NO: 1206 - protein, 16 aa, Artificial Sequence
  source: /note="Description of Artificial Sequence: Synthetic peptide"
  MOD_RES (4)..(4): Citrulline
PGPXGSPGPQGVKGES

SEQ ID NO: 1207 - protein, 16 aa, Artificial Sequence
  source: /note="Description of Artificial Sequence: Synthetic peptide"
  MOD_RES (10)..(10): Citrulline
AGAPGPAGSXGAPGPQ

SEQ ID NO: 1208 - protein, 16 aa, Artificial Sequence
  source: /note="Description of Artificial Sequence: Synthetic peptide"
  MOD_RES (6)..(6): Citrulline
  MOD_RES (15)..(15): Citrulline
GPAGSXGAPGPQGPXG

SEQ ID NO: 1209 - protein, 16 aa, Artificial Sequence
  source: /note="Description of Artificial Sequence: Synthetic peptide"
  MOD_RES (2)..(2): Citrulline
  MOD_RES (11)..(11): Citrulline
SXGAPGPQGPXGDKGE

SEQ ID NO: 1210 - protein, 16 aa, Artificial Sequence
  source: /note="Description of Artificial Sequence: Synthetic peptide"
  MOD_RES (1)..(1): Citrulline
  MOD_RES (13)..(13): Citrulline
XGPPGGVGFPGSXGDT

SEQ ID NO: 1211 - protein, 16 aa, Artificial Sequence
  source: /note="Description of Artificial Sequence: Synthetic peptide"
  MOD_RES (9)..(9): Citrulline
GGVGFPGSXGDTGPPG

SEQ ID NO: 1212 - protein, 16 aa, Artificial Sequence
  source: /note="Description of Artificial Sequence: Synthetic peptide"
  MOD_RES (8)..(8): Citrulline
  MOD_RES (10)..(10): Citrulline
FSSVSVSXSXGSGGLG

SEQ ID NO: 1213 - protein, 16 aa, Artificial Sequence
  source: /note="Description of Artificial Sequence: Synthetic peptide"
  MOD_RES (4)..(4): Citrulline
  MOD_RES (6)..(6): Citrulline
SVSXSXGSGGLGGACG

SEQ ID NO: 1214 - protein, 16 aa, Artificial Sequence
  source: /note="Description of Artificial Sequence: Synthetic peptide"
  MOD_RES (5)..(5): Citrulline
  MOD_RES (9)..(9): Citrulline
SFKEXVAEXGQKLEDS

SEQ ID NO: 1215 - protein, 16 aa, Artificial Sequence
  source: /note="Description of Artificial Sequence: Synthetic peptide"
  MOD_RES (1)..(1): Citrulline
  MOD_RES (5)..(5): Citrulline
XVAEXGQKLEDSYHLQ

SEQ ID NO: 1216 - protein, 16 aa, Artificial Sequence
  source: /note="Description of Artificial Sequence: Synthetic peptide"
  MOD_RES (3)..(3): Citrulline
  MOD_RES (11)..(11): Citrulline
LEXPGGNEITXGGSTS

SEQ ID NO: 1217 - protein, 16 aa, Artificial Sequence
  source: /note="Description of Artificial Sequence: Synthetic peptide"
  MOD_RES (7)..(7): Citrulline
GGNEITXGGSTSYGTG

SEQ ID NO: 1218 - protein, 16 aa, Artificial Sequence
  source: /note="Description of Artificial Sequence: Synthetic peptide"
  MOD_RES (13)..(13): Citrulline
SSHHPGIAEFPSXGKS

SEQ ID NO: 1219 - protein, 16 aa, Artificial Sequence
  source: /note="Description of Artificial Sequence: Synthetic peptide"
  MOD_RES (9)..(9): Citrulline
PGIAEFPSXGKSSSYS

SEQ ID NO: 1220 - protein, 16 aa, Artificial Sequence
  source: /note="Description of Artificial Sequence: Synthetic peptide"
  MOD_RES (11)..(11): Citrulline
KQFTSSTSYNXGDSTF

SEQ ID NO: 1221 - protein, 16 aa, Artificial Sequence
  source: /note="Description of Artificial Sequence: Synthetic peptide"
  MOD_RES (7)..(7): Citrulline
SSTSYNXGDSTFESKS

SEQ ID NO: 1222 - protein, 16 aa, Artificial Sequence
  source: /note="Description of Artificial Sequence: Synthetic peptide"
  MOD_RES (3)..(3): Citrulline
  MOD_RES (10)..(10): Citrulline
FNXTWQDYKXGFGSLN

SEQ ID NO: 1223 - protein, 16 aa, Artificial Sequence
  source: /note="Description of Artificial Sequence: Synthetic peptide"
  MOD_RES (6)..(6): Citrulline
WQDYKXGFGSLNDEGE

SEQ ID NO: 1224 - protein, 16 aa, Artificial Sequence
  source: /note="Description of Artificial Sequence: Synthetic peptide"
  MOD_RES (9)..(9): Citrulline
TKSIVTLQXGSLNQVQ

SEQ ID NO: 1225 - protein, 16 aa, Artificial Sequence
  source: /note="Description of Artificial Sequence: Synthetic peptide"
  MOD_RES (5)..(5): Citrulline
  MOD_RES (13)..(13): Citrulline
VTLQXGSLNQVQXWDG

SEQ ID NO: 1226 - protein, 16 aa, Artificial Sequence
  source: /note="Description of Artificial Sequence: Synthetic peptide"
  MOD_RES (3)..(3): Citrulline
  MOD_RES (12)..(12): Citrulline
VFXIDAYMAQSXGELL

SEQ ID NO: 1227 - protein, 16 aa, Artificial Sequence
  source: /note="Description of Artificial Sequence: Synthetic peptide"
  MOD_RES (8)..(8): Citrulline
DAYMAQSXGELLHSLE

SEQ ID NO: 1228 - protein, 16 aa, Artificial Sequence
  source: /note="Description of Artificial Sequence: Synthetic peptide"
  MOD_RES (4)..(4): Citrulline
AQSXGELLHSLEGFLD

SEQ ID NO: 1229 - protein, 16 aa, Artificial Sequence
  source: /note="Description of Artificial Sequence: Synthetic peptide"
  MOD_RES (6)..(6): Citrulline
  MOD_RES (10)..(10): Citrulline
VVSLIXGGTXKYAFEL

SEQ ID NO: 1230 - protein, 16 aa, Artificial Sequence
  source: /note="Description of Artificial Sequence: Synthetic peptide"
  MOD_RES (2)..(2): Citrulline
  MOD_RES (6)..(6): Citrulline
IXGGTXKYAFELKEKL

SEQ ID NO: 1231 - protein, 16 aa, Artificial Sequence
  source: /note="Description of Artificial Sequence: Synthetic peptide"
  MOD_RES (14)..(14): Citrulline
EEITYSCKPGYVSXGG

SEQ ID NO: 1232 - protein, 16 aa, Artificial Sequence
  source: /note="Description of Artificial Sequence: Synthetic peptide"
  MOD_RES (10)..(10): Citrulline
  MOD_RES (14)..(14): Citrulline
YSCKPGYVSXGGMXKF

SEQ ID NO: 1233 - protein, 16 aa, Artificial Sequence
  source: /note="Description of Artificial Sequence: Synthetic peptide"
  MOD_RES (6)..(6): Citrulline
  MOD_RES (10)..(10): Citrulline
PGYVSXGGMXKFICPL

SEQ ID NO: 1234 - protein, 16 aa, Artificial Sequence
  source: /note="Description of Artificial Sequence: Synthetic peptide"
  MOD_RES (6)..(6): Citrulline
KGFVLXGSSVIHCDAD

SEQ ID NO: 1235 - protein, 16 aa, Artificial Sequence
  source: /note="Description of Artificial Sequence: Synthetic peptide"
  MOD_RES (2)..(2): Citrulline
LXGSSVIHCDADSKWN

SEQ ID NO: 1236 - protein, 16 aa, Artificial Sequence
  source: /note="Description of Artificial Sequence: Synthetic peptide"
  MOD_RES (12)..(12): Citrulline
DYTAECKPQVTXGDVF

SEQ ID NO: 1237 - protein, 16 aa, Artificial Sequence
  source: /note="Description of Artificial Sequence: Synthetic peptide"
  MOD_RES (8)..(8): Citrulline
ECKPQVTXGDVFTMPE

SEQ ID NO: 1238 - protein, 16 aa, Artificial Sequence
  source: /note="Description of Artificial Sequence: Synthetic peptide"
  MOD_RES (4)..(4): Citrulline
QVTXGDVFTMPEDEYT

SEQ ID NO: 1239 - protein, 16 aa, Artificial Sequence
  source: /note="Description of Artificial Sequence: Synthetic peptide"
  MOD_RES (2)..(2): Citrulline
  MOD_RES (7)..(7): Citrulline
VXENIAXGMAILGPTF

SEQ ID NO: 1240 - protein, 16 aa, Artificial Sequence
  source: /note="Description of Artificial Sequence: Synthetic peptide"
  MOD_RES (3)..(3): Citrulline
IAXGMAILGPTFTLDA

SEQ ID NO: 1241 - protein, 16 aa, Artificial Sequence
  source: /note="Description of Artificial Sequence: Synthetic peptide"
  MOD_RES (7)..(8): Citrulline
TMTGGFXXGKKMGHDV

SEQ ID NO: 1242 - protein, 16 aa, Artificial Sequence
  source: /note="Description of Artificial Sequence: Synthetic peptide"
  MOD_RES (3)..(4): Citrulline
GFXXGKKMGHDVDFLI

SEQ ID NO: 1243 - protein, 16 aa, Artificial Sequence
  source: /note="Description of Artificial Sequence: Synthetic peptide"
  MOD_RES (3)..(3): Citrulline
  MOD_RES (14)..(14): Citrulline
QEXGDVMDFYKTLXGG

SEQ ID NO: 1244 - protein, 16 aa, Artificial Sequence
  source: /note="Description of Artificial Sequence: Synthetic peptide"
  MOD_RES (10)..(10): Citrulline
DVMDFYKTLXGGATVK

SEQ ID NO: 1245 - protein, 16 aa, Artificial Sequence
  source: /note="Description of Artificial Sequence: Synthetic peptide"
  MOD_RES (10)..(10): Citrulline
VLPGSPSKTXGQIQVI

SEQ ID NO: 1246 - protein, 16 aa, Artificial Sequence
  source: /note="Description of Artificial Sequence: Synthetic peptide"
  MOD_RES (6)..(6): Citrulline
SPSKTXGQIQVILGPM

SEQ ID NO: 1247 - protein, 16 aa, Artificial Sequence
  source: /note="Description of Artificial Sequence: Synthetic peptide"
  MOD_RES (12)..(13): Citrulline
VAPLSGVDFQLXXGEK

SEQ ID NO: 1248 - protein, 16 aa, Artificial Sequence
  source: /note="Description of Artificial Sequence: Synthetic peptide"
  MOD_RES (8)..(9): Citrulline
SGVDFQLXXGEKELLV

SEQ ID NO: 1249 - protein, 16 aa, Artificial Sequence
  source: /note="Description of Artificial Sequence: Synthetic peptide"
  MOD_RES (10)..(10): Citrulline
ADVFVQWMQXGQPLSP

SEQ ID NO: 1250 - protein, 16 aa, Artificial Sequence
  source: /note="Description of Artificial Sequence: Synthetic peptide"
  MOD_RES (6)..(6): Citrulline
VQWMQXGQPLSPEKYV

SEQ ID NO: 1251 - protein, 16 aa, Artificial Sequence
  source: /note="Description of Artificial Sequence: Synthetic peptide"
  MOD_RES (8)..(8): Citrulline
  MOD_RES (10)..(10): Citrulline
FSSISVSXSXGSGGLG

SEQ ID NO: 1252 - protein, 16 aa, Artificial Sequence
  source: /note="Description of Artificial Sequence: Synthetic peptide"
  MOD_RES (6)..(6): Citrulline
  MOD_RES (10)..(10): Citrulline
SISVAXGGGXGSGFGG

SEQ ID NO: 1253 - protein, 16 aa, Artificial Sequence
  source: /note="Description of Artificial Sequence: Synthetic peptide"
  MOD_RES (2)..(2): Citrulline
  MOD_RES (6)..(6): Citrulline
AXGGGXGSGFGGGYGG

SEQ ID NO: 1254 - protein, 16 aa, Artificial Sequence
  source: /note="Description of Artificial Sequence: Synthetic peptide"
  MOD_RES (2)..(2): Citrulline
GXGSGFGGGYGGGGFG

SEQ ID NO: 1255 - protein, 15 aa, Artificial Sequence
  source: /note="Description of Artificial Sequence: Synthetic peptide"
  MOD_RES (13)..(13): Citrulline
GSYGSGGGGGGGXGS

SEQ ID NO: 1256 - protein, 16 aa, Artificial Sequence
  source: /note="Description of Artificial Sequence: Synthetic peptide"
  MOD_RES (9)..(9): Citrulline
SGGGGGGGXGSYGSGG

SEQ ID NO: 1257 - protein, 16 aa, Artificial Sequence
  source: /note="Description of Artificial Sequence: Synthetic peptide"
  MOD_RES (5)..(5): Citrulline
GGGGXGSYGSGGSSYG

SEQ ID NO: 1258 - protein, 16 aa, Artificial Sequence
  source: /note="Description of Artificial Sequence: Synthetic peptide"
  MOD_RES (1)..(1): Citrulline
XGSYGSGGSSYGSGGG

SEQ ID NO: 1259 - protein, 16 aa, Artificial Sequence
  source: /note="Description of Artificial Sequence: Synthetic peptide"
  MOD_RES (12)..(12): Citrulline
SYGSGSSSGGYXGGSG

SEQ ID NO: 1260 - protein, 15 aa, Artificial Sequence
  source: /note="Description of Artificial Sequence: Synthetic peptide"
  MOD_RES (8)..(8): Citrulline
GSSSGGYXGGSGGGG

SEQ ID NO: 1261 - protein, 14 aa, Artificial Sequence
  source: /note="Description of Artificial Sequence: Synthetic peptide"
  MOD_RES (4)..(4): Citrulline
GGYXGGSGGGGGGS

SEQ ID NO: 1262 - protein, 15 aa, Artificial Sequence
  source: /note="Description of Artificial Sequence: Synthetic peptide"
  MOD_RES (10)..(10): Citrulline
GGGGGSSGGXGSGGG

SEQ ID NO: 1263 - protein, 16 aa, Artificial Sequence
  source: /note="Description of Artificial Sequence: Synthetic peptide"
  MOD_RES (6)..(6): Citrulline
GSSGGXGSGGGSSGGS

SEQ ID NO: 1264 - protein, 16 aa, Artificial Sequence
  source: /note="Description of Artificial Sequence: Synthetic peptide"
  MOD_RES (2)..(2): Citrulline
  MOD_RES (16)..(16): Citrulline
GXGSGGGSSGGSIGGX

SEQ ID NO: 1265 - protein, 16 aa, Artificial Sequence
  source: /note="Description of Artificial Sequence: Synthetic peptide"
  MOD_RES (12)..(12): Citrulline
GGGSSGGSIGGXGSSS

SEQ ID NO: 1266 - protein, 16 aa, Artificial Sequence
  source: /note="Description of Artificial Sequence: Synthetic peptide"
  MOD_RES (8)..(8): Citrulline
SGGSIGGXGSSSGGVK

SEQ ID NO: 1267 - protein, 16 aa, Artificial Sequence
  source: /note="Description of Artificial Sequence: Synthetic peptide"
  MOD_RES (4)..(4): Citrulline
IGGXGSSSGGVKSSGG

SEQ ID NO: 1268 - protein, 16 aa, Artificial Sequence
  source: /note="Description of Artificial Sequence: Synthetic peptide"
  MOD_RES (7)..(7): Citrulline
VVTGSPXGDSQSSWKS

SEQ ID NO: 1269 - protein, 16 aa, Artificial Sequence
  source: /note="Description of Artificial Sequence: Synthetic peptide"
  MOD_RES (3)..(3): Citrulline
SPXGDSQSSWKSVGSQ

SEQ ID NO: 1270 - protein, 16 aa, Artificial Sequence
  source: /note="Description of Artificial Sequence: Synthetic peptide"
  MOD_RES (10)..(10): Citrulline
LPTACTIQLXGGQIMT

SEQ ID NO: 1271 - protein, 16 aa, Artificial Sequence
  source: /note="Description of Artificial Sequence: Synthetic peptide"
  MOD_RES (6)..(6): Citrulline
  MOD_RES (15)..(15): Citrulline
CTIQLXGGQIMTLKXD

SEQ ID NO: 1272 - protein, 16 aa, Artificial Sequence
  source: /note="Description of Artificial Sequence: Synthetic peptide"
  MOD_RES (4)..(4): Citrulline
  MOD_RES (10)..(10): Citrulline
LTSXGSQQYXALTVPE

SEQ ID NO: 1273 - protein, 16 aa, Artificial Sequence
  source: /note="Description of Artificial Sequence: Synthetic peptide"
  MOD_RES (7)..(7): Citrulline
VCDIPPXGLKMAATFI

SEQ ID NO: 1274 - protein, 16 aa, Artificial Sequence
  source: /note="Description of Artificial Sequence: Synthetic peptide"
  MOD_RES (3)..(3): Citrulline
PPXGLKMAATFIGNST

SEQ ID NO: 1275 - protein, 16 aa, Artificial Sequence
  source: /note="Description of Artificial Sequence: Synthetic peptide"
  MOD_RES (9)..(9): Citrulline
  MOD_RES (12)..(12): Citrulline
DGPSGKLWXDGXGALQ

SEQ ID NO: 1276 - protein, 16 aa, Artificial Sequence
  source: /note="Description of Artificial Sequence: Synthetic peptide"
  MOD_RES (5)..(5): Citrulline
  MOD_RES (8)..(8): Citrulline
GKLWXDGXGALQNIIP

SEQ ID NO: 1277 - protein, 16 aa, Artificial Sequence
  source: /note="Description of Artificial Sequence: Synthetic peptide"
  MOD_RES (1)..(1): Citrulline
  MOD_RES (4)..(4): Citrulline
XDGXGALQNIIPASTG

SEQ ID NO: 1278 - protein, 16 aa, Artificial Sequence
  source: /note="Description of Artificial Sequence: Synthetic peptide"
  MOD_RES (15)..(15): Citrulline
HLWEVDVQGSKAYSXG

SEQ ID NO: 1279 - protein, 16 aa, Artificial Sequence
  source: /note="Description of Artificial Sequence: Synthetic peptide"
  MOD_RES (11)..(11): Citrulline
VDVQGSKAYSXGLEKA

SEQ ID NO: 1280 - protein, 16 aa, Artificial Sequence
  source: /note="Description of Artificial Sequence: Synthetic peptide"
  MOD_RES (7)..(7): Citrulline
GSKAYSXGLEKAGLLT

SEQ ID NO: 1281 - protein, 16 aa, Artificial Sequence
  source: /note="Description of Artificial Sequence: Synthetic peptide"
  MOD_RES (3)..(3): Citrulline
YSXGLEKAGLLTKAEM

SEQ ID NO: 1282 - protein, 16 aa, Artificial Sequence
  source: /note="Description of Artificial Sequence: Synthetic peptide"
  MOD_RES (8)..(8): Citrulline
  MOD_RES (14)..(14): Citrulline
CNEYYLLXGSKISXCE

SEQ ID NO: 1283 - protein, 16 aa, Artificial Sequence
  source: /note="Description of Artificial Sequence: Synthetic peptide"
  MOD_RES (4)..(4): Citrulline
  MOD_RES (10)..(10): Citrulline
YLLXGSKISXCEQGKW

SEQ ID NO: 1284 - protein, 16 aa, Artificial Sequence
  source: /note="Description of Artificial Sequence: Synthetic peptide"
  MOD_RES (7)..(7): Citrulline
FGGYTPXGNSIFGLAP

SEQ ID NO: 1285 - protein, 16 aa, Artificial Sequence
  source: /note="Description of Artificial Sequence: Synthetic peptide"
  MOD_RES (3)..(3): Citrulline
TPXGNSIFGLAPMLSD

SEQ ID NO: 1286 - protein, 16 aa, Artificial Sequence
  source: /note="Description of Artificial Sequence: Synthetic peptide"
  MOD_RES (9)..(9): Citrulline
EASEDCISXGGTLGTP

SEQ ID NO: 1287 - protein, 16 aa, Artificial Sequence
  source: /note="Description of Artificial Sequence: Synthetic peptide"
  MOD_RES (5)..(5): Citrulline
DCISXGGTLGTPQTGS

SEQ ID NO: 1288 - protein, 16 aa, Artificial Sequence
  source: /note="Description of Artificial Sequence: Synthetic peptide"
  MOD_RES (4)..(4): Citrulline
  MOD_RES (11)..(11): Citrulline
SFSXVGSSNFXGGLGG

SEQ ID NO: 1289 - protein, 16 aa, Artificial Sequence
  source: /note="Description of Artificial Sequence: Synthetic peptide"
  MOD_RES (7)..(7): Citrulline
VGSSNFXGGLGGGYGG

SEQ ID NO: 1290 - protein, 16 aa, Artificial Sequence
  source: /note="Description of Artificial Sequence: Synthetic peptide"
  MOD_RES (3)..(3): Citrulline
NFXGGLGGGYGGASGM

SEQ ID NO: 1291 - protein, 16 aa, Artificial Sequence
  source: /note="Description of Artificial Sequence: Synthetic peptide"
  MOD_RES (8)..(8): Citrulline
  MOD_RES (10)..(10): Citrulline
VPVVTGIXGXPGPAGP

SEQ ID NO: 1292 - protein, 16 aa, Artificial Sequence
  source: /note="Description of Artificial Sequence: Synthetic peptide"
  MOD_RES (4)..(4): Citrulline
  MOD_RES (6)..(6): Citrulline
TGIXGXPGPAGPPGSQ

SEQ ID NO: 1293 - protein, 16 aa, Artificial Sequence
  source: /note="Description of Artificial Sequence: Synthetic peptide"
  MOD_RES (11)..(11): Citrulline
SAGIPGPFGPXGPPGP

SEQ ID NO: 1294 - protein, 16 aa, Artificial Sequence
  source: /note="Description of Artificial Sequence: Synthetic peptide"
  MOD_RES (7)..(7): Citrulline
PGPFGPXGPPGPVGPS

SEQ ID NO: 1295 - protein, 16 aa, Artificial Sequence
  source: /note="Description of Artificial Sequence: Synthetic peptide"
  MOD_RES (10)..(10): Citrulline
LGPIGPPGVXGSVGEA

SEQ ID NO: 1296 - protein, 16 aa, Artificial Sequence
  source: /note="Description of Artificial Sequence: Synthetic peptide"
  MOD_RES (6)..(6): Citrulline
GPPGVXGSVGEAGPEG

SEQ ID NO: 1297 - protein, 16 aa, Artificial Sequence
  source: /note="Description of Artificial Sequence: Synthetic peptide"
  MOD_RES (8)..(8): Citrulline
WYGLDMNXGSQFAYGD

SEQ ID NO: 1298 - protein, 16 aa, Artificial Sequence
  source: /note="Description of Artificial Sequence: Synthetic peptide"
  MOD_RES (4)..(4): Citrulline
DMNXGSQFAYGDHQSP

SEQ ID NO: 1299 - protein, 16 aa, Artificial Sequence
  source: /note="Description of Artificial Sequence: Synthetic peptide"
  MOD_RES (13)..(13): Citrulline
KELGLYNLMNITXGSV

SEQ ID NO: 1300 - protein, 16 aa, Artificial Sequence
  source: /note="Description of Artificial Sequence: Synthetic peptide"
  MOD_RES (9)..(9): Citrulline
  MOD_RES (13)..(13): Citrulline
LYNLMNITXGSVXIEK

SEQ ID NO: 1301 - protein, 16 aa, Artificial Sequence
  source: /note="Description of Artificial Sequence: Synthetic peptide"
  MOD_RES (5)..(5): Citrulline
  MOD_RES (9)..(9): Citrulline
MNITXGSVXIEKNNEL

SEQ ID NO: 1302 - protein, 16 aa, Artificial Sequence
  source: /note="Description of Artificial Sequence: Synthetic peptide"
  MOD_RES (13)..(13): Citrulline
  MOD_RES (15)..(15): Citrulline
GGVNSSSHTGTLXTXG

SEQ ID NO: 1303 - protein, 16 aa, Artificial Sequence
  source: /note="Description of Artificial Sequence: Synthetic peptide"
  MOD_RES (9)..(9): Citrulline
  MOD_RES (11)..(11): Citrulline
SSSHTGTLXTXGGTGV

SEQ ID NO: 1304 - protein, 16 aa, Artificial Sequence
  source: /note="Description of Artificial Sequence: Synthetic peptide"
  MOD_RES (6)..(6): Citrulline
  MOD_RES (12)..(12): Citrulline
SFGNPXGTFLIXESET

SEQ ID NO: 1305 - protein, 16 aa, Artificial Sequence
  source: /note="Description of Artificial Sequence: Synthetic peptide"
  MOD_RES (2)..(2): Citrulline
  MOD_RES (8)..(8): Citrulline
PXGTFLIXESETTKGA

SEQ ID NO: 1306 - protein, 16 aa, Artificial Sequence
  source: /note="Description of Artificial Sequence: Synthetic peptide"
  MOD_RES (6)..(6): Citrulline
  MOD_RES (12)..(12): Citrulline
LSLPVXAATASXGASQ

SEQ ID NO: 1307 - protein, 16 aa, Artificial Sequence
  source: /note="Description of Artificial Sequence: Synthetic peptide"
  MOD_RES (2)..(2): Citrulline
  MOD_RES (8)..(8): Citrulline
VXAATASXGASQAGAP

SEQ ID NO: 1308 - protein, 16 aa, Artificial Sequence
  source: /note="Description of Artificial Sequence: Synthetic peptide"
  MOD_RES (9)..(9): Citrulline
MDGTEGLVXGQKVLDS

SEQ ID NO: 1309 - protein, 16 aa, Artificial Sequence
  source: /note="Description of Artificial Sequence: Synthetic peptide"
  MOD_RES (5)..(5): Citrulline
EGLVXGQKVLDSGAPI

SEQ ID NO: 1310 - protein, 16 aa, Artificial Sequence
  source: /note="Description of Artificial Sequence: Synthetic peptide"
  MOD_RES (10)..(10): Citrulline
VGSEHYDVAXGVQKIL

SEQ ID NO: 1311 - protein, 16 aa, Artificial Sequence
  source: /note="Description of Artificial Sequence: Synthetic peptide"
  MOD_RES (6)..(6): Citrulline
HYDVAXGVQKILQDYK

SEQ ID NO: 1312 - protein, 16 aa, Artificial Sequence
  source: /note="Description of Artificial Sequence: Synthetic peptide"
  MOD_RES (2)..(2): Citrulline
AXGVQKILQDYKSLQD

SEQ ID NO: 1313 - protein, 16 aa, Artificial Sequence
  source: /note="Description of Artificial Sequence: Synthetic peptide"
  MOD_RES (9)..(9): Citrulline
KASKFGSTXGAGTVFD

SEQ ID NO: 1314 - protein, 16 aa, Artificial Sequence
  source: /note="Description of Artificial Sequence: Synthetic peptide"
  MOD_RES (5)..(5): Citrulline
FGSTXGAGTVFDAFPD

SEQ ID NO: 1315 - protein, 16 aa, Artificial Sequence
  source: /note="Description of Artificial Sequence: Synthetic peptide"
  MOD_RES (10)..(11): Citrulline
YIATVCGSFXXGAESS

SEQ ID NO: 1316 - protein, 16 aa, Artificial Sequence
  source: /note="Description of Artificial Sequence: Synthetic peptide"
  MOD_RES (6)..(7): Citrulline
VCGSFXXGAESSGDMD

SEQ ID NO: 1317 - protein, 16 aa, Artificial Sequence
  source: /note="Description of Artificial Sequence: Synthetic peptide"
  MOD_RES (9)..(9): Citrulline
IGAPLFMDXGSDGKLQ

SEQ ID NO: 1318 - protein, 16 aa, Artificial Sequence
  source: /note="Description of Artificial Sequence: Synthetic peptide"
  MOD_RES (5)..(5): Citrulline
LFMDXGSDGKLQEVGQ

SEQ ID NO: 1319 - protein, 16 aa, Artificial Sequence
  source: /note="Description of Artificial Sequence: Synthetic peptide"
  MOD_RES (11)..(11): Citrulline
PSHSKNMTISXGGLMQ

SEQ ID NO: 1320 - protein, 16 aa, Artificial Sequence
  source: /note="Description of Artificial Sequence: Synthetic peptide"
  MOD_RES (7)..(7): Citrulline
KNMTISXGGLMQCEEL

SEQ ID NO: 1321 - protein, 16 aa, Artificial Sequence
  source: /note="Description of Artificial Sequence: Synthetic peptide"
  MOD_RES (10)..(10): Citrulline
  MOD_RES (15)..(15): Citrulline
FVDVLHTFTXGSPGXS

SEQ ID NO: 1322 - protein, 16 aa, Artificial Sequence
  source: /note="Description of Artificial Sequence: Synthetic peptide"
  MOD_RES (6)..(6): Citrulline
  MOD_RES (11)..(11): Citrulline
LHTFTXGSPGXSIGIQ

SEQ ID NO: 1323 - protein, 16 aa, Artificial Sequence
  source: /note="Description of Artificial Sequence: Synthetic peptide"
  MOD_RES (4)..(4): Citrulline
  MOD_RES (10)..(10): Citrulline
SGFXSQSWSXGSPSTV

SEQ ID NO: 1324 - protein, 16 aa, Artificial Sequence
  source: /note="Description of Artificial Sequence: Synthetic peptide"
  MOD_RES (6)..(6): Citrulline
SQSWSXGSPSTVSSSY

SEQ ID NO: 1325 - protein, 16 aa, Artificial Sequence
  source: /note="Description of Artificial Sequence: Synthetic peptide"
  MOD_RES (13)..(13): Citrulline
MACTEAFFPFISXGKE

SEQ ID NO: 1326 - protein, 16 aa, Artificial Sequence
  source: /note="Description of Artificial Sequence: Synthetic peptide"
  MOD_RES (9)..(9): Citrulline
EAFFPFISXGKELLWG

SEQ ID NO: 1327 - protein, 16 aa, Artificial Sequence
  source: /note="Description of Artificial Sequence: Synthetic peptide"
  MOD_RES (5)..(5): Citrulline
PFISXGKELLWGKPEE

SEQ ID NO: 1328 - protein, 16 aa, Artificial Sequence
  source: /note="Description of Artificial Sequence: Synthetic peptide"
  MOD_RES (12)..(12): Citrulline
VSITYGTPFAAXGADF

SEQ ID NO: 1329 - protein, 16 aa, Artificial Sequence
  source: /note="Description of Artificial Sequence: Synthetic peptide"
  MOD_RES (8)..(8): Citrulline
YGTPFAAXGADFQALP

SEQ ID NO: 1330 - protein, 16 aa, Artificial Sequence
  source: /note="Description of Artificial Sequence: Synthetic peptide"
  MOD_RES (4)..(4): Citrulline
FAAXGADFQALPVGSS

SEQ ID NO: 1331 - protein, 16 aa, Artificial Sequence
  source: /note="Description of Artificial Sequence: Synthetic peptide"
  MOD_RES (9)..(9): Citrulline
HMQEWLETXGSPKSHI

SEQ ID NO: 1332 - protein, 16 aa, Artificial Sequence
  source: /note="Description of Artificial Sequence: Synthetic peptide"
  MOD_RES (5)..(5): Citrulline
WLETXGSPKSHIDKAN

SEQ ID NO: 1333 - protein, 16 aa, Artificial Sequence
  source: /note="Description of Artificial Sequence: Synthetic peptide"
  MOD_RES (1)..(1): Citrulline
XGSPKSHIDKANFNNE

SEQ ID NO: 1334 - protein, 16 aa, Artificial Sequence
  source: /note="Description of Artificial Sequence: Synthetic peptide"
  MOD_RES (11)..(12): Citrulline
PNYQGQQYLLXXGEYP

SEQ ID NO: 1335 - protein, 16 aa, Artificial Sequence
  source: /note="Description of Artificial Sequence: Synthetic peptide"
  MOD_RES (7)..(8): Citrulline
GQQYLLXXGEYPDYQQ

SEQ ID NO: 1336 - protein, 16 aa, Artificial Sequence
  source: /note="Description of Artificial Sequence: Synthetic peptide"
  MOD_RES (3)..(4): Citrulline
LLXXGEYPDYQQWMGL

SEQ ID NO: 1337 - protein, 16 aa, Artificial Sequence
  source: /note="Description of Artificial Sequence: Synthetic peptide"
  MOD_RES (11)..(12): Citrulline
PNYQGHQYFLXXGEYP

SEQ ID NO: 1338 - protein, 16 aa, Artificial Sequence
  source: /note="Description of Artificial Sequence: Synthetic peptide"
  MOD_RES (7)..(8): Citrulline
GHQYFLXXGEYPDYQQ

SEQ ID NO: 1339 - protein, 16 aa, Artificial Sequence
  source: /note="Description of Artificial Sequence: Synthetic peptide"
  MOD_RES (3)..(4): Citrulline
FLXXGEYPDYQQWMGL

SEQ ID NO: 1340 - protein, 16 aa, Artificial Sequence
  source: /note="Description of Artificial Sequence: Synthetic peptide"
  MOD_RES (7)..(8): Citrulline
GLQYFLXXGDYADHQQ

SEQ ID NO: 1341 - protein, 16 aa, Artificial Sequence
  source: /note="Description of Artificial Sequence: Synthetic peptide"
  MOD_RES (3)..(4): Citrulline
FLXXGDYADHQQWMGL

SEQ ID NO: 1342 - protein, 16 aa, Artificial Sequence
  source: /note="Description of Artificial Sequence: Synthetic peptide"
  MOD_RES (9)..(9): Citrulline
ELDQPPKLXGVLQGHL

SEQ ID NO: 1343 - protein, 16 aa, Artificial Sequence
  source: /note="Description of Artificial Sequence: Synthetic peptide"
  MOD_RES (5)..(5): Citrulline
  MOD_RES (16)..(16): Citrulline
PPKLXGVLQGHLESSX

SEQ ID NO: 1344 - protein, 16 aa, Artificial Sequence
  source: /note="Description of Artificial Sequence: Synthetic peptide"
  MOD_RES (8)..(8): Citrulline
IILKALEXGSLLGCSI

SEQ ID NO: 1345 - protein, 16 aa, Artificial Sequence
  source: /note="Description of Artificial Sequence: Synthetic peptide"
  MOD_RES (4)..(4): Citrulline
ALEXGSLLGCSIDISS

SEQ ID NO: 1346 - protein, 16 aa, Artificial Sequence
  source: /note="Description of Artificial Sequence: Synthetic peptide"
  MOD_RES (12)..(13): Citrulline
KWNTTLYEGTWXXGST

SEQ ID NO: 1347 - protein, 16 aa, Artificial Sequence
  source: /note="Description of Artificial Sequence: Synthetic peptide"
  MOD_RES (8)..(9): Citrulline
TLYEGTWXXGSTAGGC

SEQ ID NO: 1348 - protein, 16 aa, Artificial Sequence
  source: /note="Description of Artificial Sequence: Synthetic peptide"
  MOD_RES (11)..(11): Citrulline
GPVLGLKECTXGSAVW

SEQ ID NO: 1349 - protein, 16 aa, Artificial Sequence
  source: /note="Description of Artificial Sequence: Synthetic peptide"
  MOD_RES (13)..(13): Citrulline
ELEQSGYYVCYPXGSK

SEQ ID NO: 1350 - protein, 16 aa, Artificial Sequence
  source: /note="Description of Artificial Sequence: Synthetic peptide"
  MOD_RES (9)..(9): Citrulline
SGYYVCYPXGSKPEDA

SEQ ID NO: 1351 - protein, 16 aa, Artificial Sequence
  source: /note="Description of Artificial Sequence: Synthetic peptide"
  MOD_RES (5)..(5): Citrulline
VCYPXGSKPEDANFYL

SEQ ID NO: 1352 - protein, 16 aa, Artificial Sequence
  source: /note="Description of Artificial Sequence: Synthetic peptide"
  MOD_RES (7)..(7): Citrulline
CPQDCLXGSIVGGHEP

SEQ ID NO: 1353 - protein, 16 aa, Artificial Sequence
  source: /note="Description of Artificial Sequence: Synthetic peptide"
  MOD_RES (3)..(3): Citrulline
  MOD_RES (16)..(16): Citrulline
CLXGSIVGGHEPGEPX

SEQ ID NO: 1354 - protein, 16 aa, Artificial Sequence
  source: /note="Description of Artificial Sequence: Synthetic peptide"
  MOD_RES (3)..(3): Citrulline
  MOD_RES (9)..(9): Citrulline
SLXQMKKTXGTLLALE

SEQ ID NO: 1355 - protein, 16 aa, Artificial Sequence
  source: /note="Description of Artificial Sequence: Synthetic peptide"
  MOD_RES (5)..(5): Citrulline
  MOD_RES (13)..(13): Citrulline
MKKTXGTLLALEXKDH

SEQ ID NO: 1356 - protein, 16 aa, Artificial Sequence
  source: /note="Description of Artificial Sequence: Synthetic peptide"
  MOD_RES (10)..(10): Citrulline
GANQQIITNXGSGGNI

SEQ ID NO: 1357 - protein, 16 aa, Artificial Sequence
  source: /note="Description of Artificial Sequence: Synthetic peptide"
  MOD_RES (7)..(7): Citrulline
  MOD_RES (13)..(13): Citrulline
PGPPGLXGSPGSXGLP

SEQ ID NO: 1358 - protein, 16 aa, Artificial Sequence
  source: /note="Description of Artificial Sequence: Synthetic peptide"
  MOD_RES (3)..(3): Citrulline
  MOD_RES (9)..(9): Citrulline
GLXGSPGSXGLPGADG

SEQ ID NO: 1359 - protein, 16 aa, Artificial Sequence
  source: /note="Description of Artificial Sequence: Synthetic peptide"
  MOD_RES (1)..(1): Citrulline
  MOD_RES (13)..(13): Citrulline
XGDKGEPGEKGPXGLP

SEQ ID NO: 1360 - protein, 16 aa, Artificial Sequence
  source: /note="Description of Artificial Sequence: Synthetic peptide"
  MOD_RES (13)..(13): Citrulline
TTVMGSSQPVVTXGTT

SEQ ID NO: 1361 - protein, 16 aa, Artificial Sequence
  source: /note="Description of Artificial Sequence: Synthetic peptide"
  MOD_RES (9)..(9): Citrulline
GSSQPVVTXGTTDNLI

SEQ ID NO: 1362 - protein, 16 aa, Artificial Sequence
  source: /note="Description of Artificial Sequence: Synthetic peptide"
  MOD_RES (7)..(7): Citrulline
DTLVGEXGAQLSGGQK

SEQ ID NO: 1363 - protein, 16 aa, Artificial Sequence
  source: /note="Description of Artificial Sequence: Synthetic peptide"
  MOD_RES (3)..(3): Citrulline
  MOD_RES (14)..(14): Citrulline
GEXGAQLSGGQKQXIA

SEQ ID NO: 1364 - protein, 16 aa, Artificial Sequence
  source: /note="Description of Artificial Sequence: Synthetic peptide"
  MOD_RES (4)..(4): Citrulline
  MOD_RES (13)..(13): Citrulline
FTVXADHGEPIGXGTK

SEQ ID NO: 1365 - protein, 16 aa, Artificial Sequence
  source: /note="Description of Artificial Sequence: Synthetic peptide"
  MOD_RES (10)..(10): Citrulline
WIYSASTLEXGYPKPL

SEQ ID NO: 1366 - protein, 16 aa, Artificial Sequence
  source: /note="Description of Artificial Sequence: Synthetic peptide"
  MOD_RES (6)..(6): Citrulline
ASTLEXGYPKPLTSLG

SEQ ID NO: 1367 - protein, 16 aa, Artificial Sequence
  source: /note="Description of Artificial Sequence: Synthetic peptide"
  MOD_RES (9)..(9): Citrulline
GSAFGFSLXGAVDIDD

SEQ ID NO: 1368 - protein, 16 aa, Artificial Sequence
  source: /note="Description of Artificial Sequence: Synthetic peptide"
  MOD_RES (2)..(2): Citrulline
  MOD_RES (9)..(9): Citrulline
YXGDGQSYXGTLSTTI

SEQ ID NO: 1369 - protein, 16 aa, Artificial Sequence
  source: /note="Description of Artificial Sequence: Synthetic peptide"
  MOD_RES (9)..(9): Citrulline
AASTDYYKXGDFIPGL

SEQ ID NO: 1370 - protein, 16 aa, Artificial Sequence
  source: /note="Description of Artificial Sequence: Synthetic peptide"
  MOD_RES (5)..(5): Citrulline
  MOD_RES (13)..(13): Citrulline
DYYKXGDFIPGLXVDG

SEQ ID NO: 1371 - protein, 16 aa, Artificial Sequence
  source: /note="Description of Artificial Sequence: Synthetic peptide"
  MOD_RES (11)..(11): Citrulline
FPGLPGSPGAXGPKGW

SEQ ID NO: 1372 - protein, 16 aa, Artificial Sequence
  source: /note="Description of Artificial Sequence: Synthetic peptide"
  MOD_RES (7)..(7): Citrulline
PGSPGAXGPKGWKGDA

SEQ ID NO: 1373 - protein, 16 aa, Artificial Sequence
  source: /note="Description of Artificial Sequence: Synthetic peptide"
  MOD_RES (8)..(8): Citrulline
PPGFIGPXGSKGAVGL

SEQ ID NO: 1374 - protein, 16 aa, Artificial Sequence
  source: /note="Description of Artificial Sequence: Synthetic peptide"
  MOD_RES (4)..(4): Citrulline
IGPXGSKGAVGLPGPD

SEQ ID NO: 1375 - protein, 16 aa, Artificial Sequence
  source: /note="Description of Artificial Sequence: Synthetic peptide"
  MOD_RES (6)..(6): Citrulline
  MOD_RES (12)..(12): Citrulline
GLPGDXGPPGFXGSQG

SEQ ID NO: 1376 - protein, 16 aa, Artificial Sequence
  source: /note="Description of Artificial Sequence: Synthetic peptide"
  MOD_RES (2)..(2): Citrulline
  MOD_RES (8)..(8): Citrulline
DXGPPGFXGSQGMPGM

SEQ ID NO: 1377 - protein, 16 aa, Artificial Sequence
  source: /note="Description of Artificial Sequence: Synthetic peptide"
  MOD_RES (13)..(13): Citrulline
PGITGFPGFIGSXGDK

SEQ ID NO: 1378 - protein, 16 aa, Artificial Sequence
  source: /note="Description of Artificial Sequence: Synthetic peptide"
  MOD_RES (9)..(9): Citrulline
GFPGFIGSXGDKGAPG

SEQ ID NO: 1379 - protein, 16 aa, Artificial Sequence
  source: /note="Description of Artificial Sequence: Synthetic peptide"
  MOD_RES (5)..(5): Citrulline
  MOD_RES (13)..(13): Citrulline
FIGSXGDKGAPGXAGL

SEQ ID NO: 1380 - protein, 16 aa, Artificial Sequence
  source: /note="Description of Artificial Sequence: Synthetic peptide"
  MOD_RES (7)..(7): Citrulline
PGEPGFXGAPGKAGPQ

SEQ ID NO: 1381 - protein, 16 aa, Artificial Sequence
  source: /note="Description of Artificial Sequence: Synthetic peptide"
  MOD_RES (3)..(3): Citrulline
  MOD_RES (14)..(14): Citrulline
GFXGAPGKAGPQGXGG

SEQ ID NO: 1382 - protein, 16 aa, Artificial Sequence
  source: /note="Description of Artificial Sequence: Synthetic peptide"
  MOD_RES (11)..(11): Citrulline
  MOD_RES (13)..(13): Citrulline
VALSSKSGLSXGXKVM

SEQ ID NO: 1383 - protein, 16 aa, Artificial Sequence
  source: /note="Description of Artificial Sequence: Synthetic peptide"
  MOD_RES (7)..(7): Citrulline
  MOD_RES (9)..(9): Citrulline
SKSGLSXGXKVMLSAL

SEQ ID NO: 1384 - protein, 16 aa, Artificial Sequence
  source: /note="Description of Artificial Sequence: Synthetic peptide"
  MOD_RES (7)..(7): Citrulline
LWELMTXGAPPYPDVN

SEQ ID NO: 1385 - protein, 16 aa, Artificial Sequence
  source: /note="Description of Artificial Sequence: Synthetic peptide"
  MOD_RES (3)..(3): Citrulline
MTXGAPPYPDVNTFDI

SEQ ID NO: 1386 - protein, 16 aa, Artificial Sequence
  source: /note="Description of Artificial Sequence: Synthetic peptide"
  MOD_RES (7)..(7): Citrulline
  MOD_RES (15)..(15): Citrulline
EITYQCXNGFYPATXG

SEQ ID NO: 1387 - protein, 16 aa, Artificial Sequence
  source: /note="Description of Artificial Sequence: Synthetic peptide"
  MOD_RES (3)..(3): Citrulline
  MOD_RES (11)..(11): Citrulline
QCXNGFYPATXGNTAK

SEQ ID NO: 1388 - protein, 16 aa, Artificial Sequence
  source: /note="Description of Artificial Sequence: Synthetic peptide"
  MOD_RES (7)..(7): Citrulline
GFYPATXGNTAKCTST

SEQ ID NO: 1389 - protein, 16 aa, Artificial Sequence
  source: /note="Description of Artificial Sequence: Synthetic peptide"
  MOD_RES (12)..(12): Citrulline
  MOD_RES (14)..(14): Citrulline
GSFGVDKAVVYXGXPI

SEQ ID NO: 1390 - protein, 16 aa, Artificial Sequence
  source: /note="Description of Artificial Sequence: Synthetic peptide"
  MOD_RES (8)..(8): Citrulline
  MOD_RES (10)..(10): Citrulline
VDKAVVYXGXPIVSAS

SEQ ID NO: 1391 - protein, 16 aa, Artificial Sequence
  source: /note="Description of Artificial Sequence: Synthetic peptide"
  MOD_RES (9)..(9): Citrulline
LQSLKGFPXGDKLFGP

SEQ ID NO: 1392 - protein, 16 aa, Artificial Sequence
  source: /note="Description of Artificial Sequence: Synthetic peptide"
  MOD_RES (5)..(5): Citrulline
KGFPXGDKLFGPDLKL

SEQ ID NO: 1393 - protein, 16 aa, Artificial Sequence
  source: /note="Description of Artificial Sequence: Synthetic peptide"
  MOD_RES (1)..(1): Citrulline
XGDKLFGPDLKLVPPM

SEQ ID NO: 1394 - protein, 16 aa, Artificial Sequence
  source: /note="Description of Artificial Sequence: Synthetic peptide"
  MOD_RES (8)..(8): Citrulline
CPAQEVAXGVLTSLPG

SEQ ID NO: 1395 - protein, 16 aa, Artificial Sequence
  source: /note="Description of Artificial Sequence: Synthetic peptide"
  MOD_RES (4)..(4): Citrulline
EVAXGVLTSLPGDSVT

SEQ ID NO: 1396 - protein, 16 aa, Artificial Sequence
  source: /note="Description of Artificial Sequence: Synthetic peptide"
  MOD_RES (9)..(9): Citrulline
  MOD_RES (12)..(12): Citrulline
EHHGIAPSXGMXIGVQ

SEQ ID NO: 1397 - protein, 16 aa, Artificial Sequence
  source: /note="Description of Artificial Sequence: Synthetic peptide"
  MOD_RES (5)..(5): Citrulline
  MOD_RES (8)..(8): Citrulline
IAPSXGMXIGVQIHNT

SEQ ID NO: 1398 - protein, 16 aa, Artificial Sequence
  source: /note="Description of Artificial Sequence: Synthetic peptide"
  MOD_RES (9)..(9): Citrulline
  MOD_RES (12)..(12): Citrulline
GSLTTVLIXGQXLATT

SEQ ID NO: 1399 - protein, 16 aa, Artificial Sequence
  source: /note="Description of Artificial Sequence: Synthetic peptide"
  MOD_RES (5)..(5): Citrulline
  MOD_RES (8)..(8): Citrulline
TVLIXGQXLATTADEP

SEQ ID NO: 1400 - protein, 16 aa, Artificial Sequence
  source: /note="Description of Artificial Sequence: Synthetic peptide"
  MOD_RES (1)..(1): Citrulline
  MOD_RES (4)..(4): Citrulline
XGQXLATTADEPMVFV

SEQ ID NO: 1401 - protein, 16 aa, Artificial Sequence
  source: /note="Description of Artificial Sequence: Synthetic peptide"
  MOD_RES (5)..(5): Citrulline
  MOD_RES (10)..(10): Citrulline
GCTVXNSFSXGLSMCG

SEQ ID NO: 1402 - protein, 16 aa, Artificial Sequence
  source: /note="Description of Artificial Sequence: Synthetic peptide"
  MOD_RES (1)..(1): Citrulline
  MOD_RES (6)..(6): Citrulline
XNSFSXGLSMCGTLGL

SEQ ID NO: 1403 - protein, 16 aa, Artificial Sequence
  source: /note="Description of Artificial Sequence: Synthetic peptide"
  MOD_RES (8)..(8): Citrulline
  MOD_RES (11)..(11): Citrulline
GGCQISGXGAXGCNGI

SEQ ID NO: 1404 - protein, 16 aa, Artificial Sequence
  source: /note="Description of Artificial Sequence: Synthetic peptide"
  MOD_RES (4)..(4): Citrulline
  MOD_RES (7)..(7): Citrulline
ISGXGAXGCNGIPGAA

SEQ ID NO: 1405 - protein, 16 aa, Artificial Sequence
  source: /note="Description of Artificial Sequence: Synthetic peptide"
  MOD_RES (9)..(9): Citrulline
AYKITPGAXGAFSEEY

SEQ ID NO: 1406 - protein, 16 aa, Artificial Sequence
  source: /note="Description of Artificial Sequence: Synthetic peptide"
  MOD_RES (5)..(5): Citrulline
  MOD_RES (14)..(14): Citrulline
TPGAXGAFSEEYKXLD

SEQ ID NO: 1407 - protein, 16 aa, Artificial Sequence
  source: /note="Description of Artificial Sequence: Synthetic peptide"
  MOD_RES (13)..(13): Citrulline
  MOD_RES (16)..(16): Citrulline
DVDKLSPTDNLPXGSX

SEQ ID NO: 1408 - protein, 16 aa, Artificial Sequence
  source: /note="Description of Artificial Sequence: Synthetic peptide"
  MOD_RES (9)..(9): Citrulline
  MOD_RES (12)..(12): Citrulline
LSPTDNLPXGSXAHIT

SEQ ID NO: 1409 - protein, 16 aa, Artificial Sequence
  source: /note="Description of Artificial Sequence: Synthetic peptide"
  MOD_RES (4)..(4): Citrulline
  MOD_RES (13)..(13): Citrulline
GGSXGEEVGELSXGKL

SEQ ID NO: 1410 - protein, 16 aa, Artificial Sequence
  source: /note="Description of Artificial Sequence: Synthetic peptide"
  MOD_RES (9)..(9): Citrulline
GEEVGELSXGKLYSLG

SEQ ID NO: 1411 - protein, 16 aa, Artificial Sequence
  source: /note="Description of Artificial Sequence: Synthetic peptide"
  MOD_RES (5)..(5): Citrulline
  MOD_RES (15)..(15): Citrulline
GELSXGKLYSLGNGXW

SEQ ID NO: 1412 - protein, 16 aa, Artificial Sequence
  source: /note="Description of Artificial Sequence: Synthetic peptide"
  MOD_RES (4)..(4): Citrulline
  MOD_RES (9)..(9): Citrulline
IGLXSKTLXGTPNYLP

SEQ ID NO: 1413 - protein, 16 aa, Artificial Sequence
  source: /note="Description of Artificial Sequence: Synthetic peptide"
  MOD_RES (5)..(5): Citrulline
  MOD_RES (14)..(14): Citrulline
SKTLXGTPNYLPIXQD

SEQ ID NO: 1414 - protein, 16 aa, Artificial Sequence
  source: /note="Description of Artificial Sequence: Synthetic peptide"
  MOD_RES (13)..(13): Citrulline
YYHMAHGKDFASXGIE

SEQ ID NO: 1415 - protein, 16 aa, Artificial Sequence
  source: /note="Description of Artificial Sequence: Synthetic peptide"
  MOD_RES (9)..(9): Citrulline
AHGKDFASXGIEMSEV

SEQ ID NO: 1416 - protein, 16 aa, Artificial Sequence
  source: /note="Description of Artificial Sequence: Synthetic peptide"
  MOD_RES (5)..(5): Citrulline
  MOD_RES (13)..(13): Citrulline
DFASXGIEMSEVXLNL

SEQ ID NO: 1417 - protein, 16 aa, Artificial Sequence
  source: /note="Description of Artificial Sequence: Synthetic peptide"
  MOD_RES (6)..(6): Citrulline
NFGGGXGGGFGGNDNF

SEQ ID NO: 1418 - protein, 16 aa, Artificial Sequence
  source: /note="Description of Artificial Sequence: Synthetic peptide"
  MOD_RES (2)..(2): Citrulline
  MOD_RES (14)..(14): Citrulline
GXGGGFGGNDNFGXGG

SEQ ID NO: 1419 - protein, 16 aa, Artificial Sequence
  source: /note="Description of Artificial Sequence: Synthetic peptide"
  MOD_RES (10)..(10): Citrulline
GFGGNDNFGXGGNFSG

SEQ ID NO: 1420 - protein, 16 aa, Artificial Sequence
  source: /note="Description of Artificial Sequence: Synthetic peptide"
  MOD_RES (6)..(6): Citrulline
  MOD_RES (13)..(13): Citrulline
NDNFGXGGNFSGXGGF

SEQ ID NO: 1421 - protein, 16 aa, Artificial Sequence
  source: /note="Description of Artificial Sequence: Synthetic peptide"
  MOD_RES (5)..(5): Citrulline
  MOD_RES (12)..(12): Citrulline
NFSGXGGFGGSXGGGG

SEQ ID NO: 1422 - protein, 15 aa, Artificial Sequence
  source: /note="Description of Artificial Sequence: Synthetic peptide"
  MOD_RES (1)..(1): Citrulline
  MOD_RES (8)..(8): Citrulline
XGGFGGSXGGGGYGG

SEQ ID NO: 1423 - protein, 16 aa, Artificial Sequence
  source: /note="Description of Artificial Sequence: Synthetic peptide"
  MOD_RES (13)..(13): Citrulline
YGGGGPGYSGGSXGYG

SEQ ID NO: 1424 - protein, 16 aa, Artificial Sequence
  source: /note="Description of Artificial Sequence: Synthetic peptide"
  MOD_RES (9)..(9): Citrulline
GPGYSGGSXGYGSGGQ

SEQ ID NO: 1425 - protein, 16 aa, Artificial Sequence
  source: /note="Description of Artificial Sequence: Synthetic peptide"
  MOD_RES (2)..(2): Citrulline
  MOD_RES (7)..(7): Citrulline
DXELDLXGYKIPVIEN

SEQ ID NO: 1426 - protein, 16 aa, Artificial Sequence
  source: /note="Description of Artificial Sequence: Synthetic peptide"
  MOD_RES (3)..(3): Citrulline
DLXGYKIPVIENLGAT

SEQ ID NO: 1427 - protein, 16 aa, Artificial Sequence
  source: /note="Description of Artificial Sequence: Synthetic peptide"
  MOD_RES (5)..(5): Citrulline
  MOD_RES (11)..(11): Citrulline
SLSIXDWDQTXGDHVK

SEQ ID NO: 1428 - protein, 16 aa, Artificial Sequence
  source: /note="Description of Artificial Sequence: Synthetic peptide"
  MOD_RES (1)..(1): Citrulline
  MOD_RES (7)..(7): Citrulline
XDWDQTXGDHVKHYKI

SEQ ID NO: 1429 - protein, 16 aa, Artificial Sequence
  source: /note="Description of Artificial Sequence: Synthetic peptide"
  MOD_RES (9)..(9): Citrulline
QFVSLEYTXGKVPIYL

SEQ ID NO: 1430 - protein, 16 aa, Artificial Sequence
  source: /note="Description of Artificial Sequence: Synthetic peptide"
  MOD_RES (5)..(5): Citrulline
LEYTXGKVPIYLAGNG

SEQ ID NO: 1431 - protein, 16 aa, Artificial Sequence
  source: /note="Description of Artificial Sequence: Synthetic peptide"
  MOD_RES (5)..(5): Citrulline
GYTLXGSSIFGLAPSK

SEQ ID NO: 1432 - protein, 16 aa, Artificial Sequence
  source: /note="Description of Artificial Sequence: Synthetic peptide"
  MOD_RES (1)..(1): Citrulline
XGSSIFGLAPSKAQDS

SEQ ID NO: 1433 - protein, 16 aa, Artificial Sequence
  source: /note="Description of Artificial Sequence: Synthetic peptide"
  MOD_RES (8)..(8): Citrulline
  MOD_RES (14)..(14): Citrulline
LAEEAFFXGVSQGXGG

SEQ ID NO: 1434 - protein, 16 aa, Artificial Sequence
  source: /note="Description of Artificial Sequence: Synthetic peptide"
  MOD_RES (13)..(13): Citrulline
GTEPDPALYLPAXGAL

SEQ ID NO: 1435 - protein, 16 aa, Artificial Sequence
  source: /note="Description of Artificial Sequence: Synthetic peptide"
  MOD_RES (9)..(9): Citrulline
  MOD_RES (16)..(16): Citrulline
DPALYLPAXGALDGTX

SEQ ID NO: 1436 - protein, 16 aa, Artificial Sequence
  source: /note="Description of Artificial Sequence: Synthetic peptide"
  MOD_RES (5)..(5): Citrulline
  MOD_RES (12)..(12): Citrulline
YLPAXGALDGTXPDGP

SEQ ID NO: 1437 - protein, 16 aa, Artificial Sequence
  source: /note="Description of Artificial Sequence: Synthetic peptide"
  MOD_RES (2)..(2): Citrulline
  MOD_RES (10)..(10): Citrulline
NXLPQITTNXGAPALK

SEQ ID NO: 1438 - protein, 16 aa, Artificial Sequence
  source: /note="Description of Artificial Sequence: Synthetic peptide"
  MOD_RES (6)..(6): Citrulline
  MOD_RES (13)..(13): Citrulline
QITTNXGAPALKXLHT

SEQ ID NO: 1439 - protein, 16 aa, Artificial Sequence
  source: /note="Description of Artificial Sequence: Synthetic peptide"
  MOD_RES (9)..(9): Citrulline
EDGKKTFFXGLESQTK

SEQ ID NO: 1440 - protein, 16 aa, Artificial Sequence
  source: /note="Description of Artificial Sequence: Synthetic peptide"
  MOD_RES (5)..(5): Citrulline
KTFFXGLESQTKLVNG

SEQ ID NO: 1441 - protein, 16 aa, Artificial Sequence
  source: /note="Description of Artificial Sequence: Synthetic peptide"
  MOD_RES (8)..(8): Citrulline
VSLKVVAXGSFEFPVG

SEQ ID NO: 1442 - protein, 16 aa, Artificial Sequence
  source: /note="Description of Artificial Sequence: Synthetic peptide"
  MOD_RES (4)..(4): Citrulline
VVAXGSFEFPVGDAVS

SEQ ID NO: 1443 - protein, 16 aa, Artificial Sequence
  source: /note="Description of Artificial Sequence: Synthetic peptide"
  MOD_RES (10)..(10): Citrulline
  MOD_RES (12)..(12): Citrulline
VYELNPLDHXGXTLEI

SEQ ID NO: 1444 - protein, 16 aa, Artificial Sequence
  source: /note="Description of Artificial Sequence: Synthetic peptide"
  MOD_RES (6)..(6): Citrulline
  MOD_RES (8)..(8): Citrulline
NPLDHXGXTLEIPGNS

SEQ ID NO: 1445 - protein, 16 aa, Artificial Sequence
  source: /note="Description of Artificial Sequence: Synthetic peptide"
  MOD_RES (2)..(2): Citrulline
  MOD_RES (4)..(4): Citrulline
HXGXTLEIPGNSDPNM

SEQ ID NO: 1446 - protein, 16 aa, Artificial Sequence
  source: /note="Description of Artificial Sequence: Synthetic peptide"
  MOD_RES (8)..(8): Citrulline
LDSSWVSXGPDKLLPY

SEQ ID NO: 1447 - protein, 16 aa, Artificial Sequence
  source: /note="Description of Artificial Sequence: Synthetic peptide"
  MOD_RES (4)..(4): Citrulline
WVSXGPDKLLPYPTLA

SEQ ID NO: 1448 - protein, 16 aa, Artificial Sequence
  source: /note="Description of Artificial Sequence: Synthetic peptide"
  MOD_RES (9)..(9): Citrulline
GALDFLHSXGLVHADV

SEQ ID NO: 1449 - protein, 16 aa, Artificial Sequence
  source: /note="Description of Artificial Sequence: Synthetic peptide"
  MOD_RES (5)..(5): Citrulline
FLHSXGLVHADVKPDN

SEQ ID NO: 1450 - protein, 16 aa, Artificial Sequence
  source: /note="Description of Artificial Sequence: Synthetic peptide"
  MOD_RES (11)..(12): Citrulline
APPWTQPSVPXXGAAT

SEQ ID NO: 1451 - protein, 16 aa, Artificial Sequence
  source: /note="Description of Artificial Sequence: Synthetic peptide"
  MOD_RES (7)..(8): Citrulline
TQPSVPXXGAATWGQE

SEQ ID NO: 1452 - protein, 16 aa, Artificial Sequence
  source: /note="Description of Artificial Sequence: Synthetic peptide"
  MOD_RES (3)..(4): Citrulline
VPXXGAATWGQEKAEY

SEQ ID NO: 1453 - protein, 16 aa, Artificial Sequence
  source: /note="Description of Artificial Sequence: Synthetic peptide"
  MOD_RES (7)..(7): Citrulline
  MOD_RES (11)..(11): Citrulline
QGWKNTXCATXGLVNT

SEQ ID NO: 1454 - protein, 16 aa, Artificial Sequence
  source: /note="Description of Artificial Sequence: Synthetic peptide"
  MOD_RES (3)..(3): Citrulline
  MOD_RES (7)..(7): Citrulline
NTXCATXGLVNTLVNT

SEQ ID NO: 1455 - protein, 16 aa, Artificial Sequence
  source: /note="Description of Artificial Sequence: Synthetic peptide"
  MOD_RES (11)..(11): Citrulline
LKATNVEGPVXGAQVL

SEQ ID NO: 1456 - protein, 16 aa, Artificial Sequence
  source: /note="Description of Artificial Sequence: Synthetic peptide"
  MOD_RES (7)..(7): Citrulline
NVEGPVXGAQVLGCSF

SEQ ID NO: 1457 - protein, 16 aa, Artificial Sequence
  source: /note="Description of Artificial Sequence: Synthetic peptide"
  MOD_RES (3)..(3): Citrulline
PVXGAQVLGCSFKPVQ

SEQ ID NO: 1458 - protein, 16 aa, Artificial Sequence
  source: /note="Description of Artificial Sequence: Synthetic peptide"
  MOD_RES (11)..(11): Citrulline
  MOD_RES (14)..(14): Citrulline
GCVNTVHFNQXGTXLA

SEQ ID NO: 1459 - protein, 16 aa, Artificial Sequence
  source: /note="Description of Artificial Sequence: Synthetic peptide"
  MOD_RES (7)..(7): Citrulline
  MOD_RES (10)..(10): Citrulline
TVHFNQXGTXLASSGD

SEQ ID NO: 1460 - protein, 16 aa, Artificial Sequence
  source: /note="Description of Artificial Sequence: Synthetic peptide"
  MOD_RES (10)..(10): Citrulline
  MOD_RES (15)..(15): Citrulline
SSMQLDTPEXGSSLXK

SEQ ID NO: 1461 - protein, 16 aa, Artificial Sequence
  source: /note="Description of Artificial Sequence: Synthetic peptide"
  MOD_RES (6)..(6): Citrulline
  MOD_RES (11)..(11): Citrulline
LDTPEXGSSLXKDGPL

SEQ ID NO: 1462 - protein, 16 aa, Artificial Sequence
  source: /note="Description of Artificial Sequence: Synthetic peptide"
  MOD_RES (8)..(8): Citrulline
NLKPWKPXGEANPGPL

SEQ ID NO: 1463 - protein, 16 aa, Artificial Sequence
  source: /note="Description of Artificial Sequence: Synthetic peptide"
  MOD_RES (4)..(4): Citrulline
WKPXGEANPGPLNKDK

SEQ ID NO: 1464 - protein, 16 aa, Artificial Sequence
  source: /note="Description of Artificial Sequence: Synthetic peptide"
  MOD_RES (11)..(11): Citrulline
  MOD_RES (15)..(15): Citrulline
PDAAELPGLSXGKFXA

SEQ ID NO: 1465 - protein, 14 aa, Artificial Sequence
  source: /note="Description of Artificial Sequence: Synthetic peptide"
  MOD_RES (7)..(7): Citrulline
  MOD_RES (11)..(11): Citrulline
ELPGLSXGKFXALL

SEQ ID NO: 1466 - protein, 16 aa, Artificial Sequence
  source: /note="Description of Artificial Sequence: Synthetic peptide"
  MOD_RES (6)..(6): Citrulline
PQTLPXGQSLHLTQVK

SEQ ID NO: 1467 - protein, 16 aa, Artificial Sequence
  source: /note="Description of Artificial Sequence: Synthetic peptide"
  MOD_RES (2)..(2): Citrulline
PXGQSLHLTQVKSLAQ

SEQ ID NO: 1468 - protein, 16 aa, Artificial Sequence
  source: /note="Description of Artificial Sequence: Synthetic peptide"
  MOD_RES (12)..(12): Citrulline
IYTEGWKCMAGXGTCI

SEQ ID NO: 1469 - protein, 16 aa, Artificial Sequence
  source: /note="Description of Artificial Sequence: Synthetic peptide"
  MOD_RES (8)..(8): Citrulline
GWKCMAGXGTCIAKEN

SEQ ID NO: 1470 - protein, 16 aa, Artificial Sequence
  source: /note="Description of Artificial Sequence: Synthetic peptide"
  MOD_RES (7)..(7): Citrulline
MAHGGPXGQLLGADGQ

SEQ ID NO: 1471 - protein, 16 aa, Artificial Sequence
  source: /note="Description of Artificial Sequence: Synthetic peptide"
  MOD_RES (3)..(3): Citrulline
GPXGQLLGADGQEVQP

SEQ ID NO: 1472 - protein, 16 aa, Artificial Sequence
  source: /note="Description of Artificial Sequence: Synthetic peptide"
  MOD_RES (10)..(10): Citrulline
KIQGGTEIQXGSFANQ

SEQ ID NO: 1473 - protein, 16 aa, Artificial Sequence
  source: /note="Description of Artificial Sequence: Synthetic peptide"
  MOD_RES (6)..(6): Citrulline
GTEIQXGSFANQYQTD

SEQ ID NO: 1474 - protein, 16 aa, Artificial Sequence
  source: /note="Description of Artificial Sequence: Synthetic peptide"
  MOD_RES (2)..(2): Citrulline
QXGSFANQYQTDASHL

SEQ ID NO: 1475 - protein, 16 aa, Artificial Sequence
  source: /note="Description of Artificial Sequence: Synthetic peptide"
  MOD_RES (10)..(10): Citrulline
MGPNSGPSSXGIGLPG

SEQ ID NO: 1476 - protein, 16 aa, Artificial Sequence
  source: /note="Description of Artificial Sequence: Synthetic peptide"
  MOD_RES (6)..(6): Citrulline
SGPSSXGIGLPGPNPS

SEQ ID NO: 1477 - protein, 16 aa, Artificial Sequence
  source: /note="Description of Artificial Sequence: Synthetic peptide"
  MOD_RES (12)..(12): Citrulline
GPMGVNANPFPXGAGS

SEQ ID NO: 1478 - protein, 16 aa, Artificial Sequence
  source: /note="Description of Artificial Sequence: Synthetic peptide"
  MOD_RES (8)..(8): Citrulline
VNANPFPXGAGSSAFS

SEQ ID NO: 1479 - protein, 16 aa, Artificial Sequence
  source: /note="Description of Artificial Sequence: Synthetic peptide"
  MOD_RES (4)..(4): Citrulline
PFPXGAGSSAFSQSSG

SEQ ID NO: 1480 - protein, 16 aa, Artificial Sequence
  source: /note="Description of Artificial Sequence: Synthetic peptide"
  MOD_RES (9)..(9): Citrulline
CCHCFPCCXGSGKSNV

SEQ ID NO: 1481 - protein, 16 aa, Artificial Sequence
  source: /note="Description of Artificial Sequence: Synthetic peptide"
  MOD_RES (5)..(5): Citrulline
FPCCXGSGKSNVGTSG

SEQ ID NO: 1482 - protein, 16 aa, Artificial Sequence
  source: /note="Description of Artificial Sequence: Synthetic peptide"
  MOD_RES (5)..(5): Citrulline
FPCCXGSGKSNVGAWG

SEQ ID NO: 1483 - protein, 16 aa, Artificial Sequence
  source: /note="Description of Artificial Sequence: Synthetic peptide"
  MOD_RES (9)..(9): Citrulline
GFAVATGGXGSGGLAG

SEQ ID NO: 1484 - protein, 16 aa, Artificial Sequence
  source: /note="Description of Artificial Sequence: Synthetic peptide"
  MOD_RES (5)..(5): Citrulline
ATGGXGSGGLAGGSGA

SEQ ID NO: 1485 - protein, 16 aa, Artificial Sequence
  source: /note="Description of Artificial Sequence: Synthetic peptide"
  MOD_RES (7)..(7): Citrulline
MVPEAAXGKVFQDSQE

SEQ ID NO: 1486 - protein, 16 aa, Artificial Sequence
  source: /note="Description of Artificial Sequence: Synthetic peptide"
  MOD_RES (8)..(8): Citrulline
HLFGNLKXGGPASGPG

SEQ ID NO: 1487 - protein, 16 aa, Artificial Sequence
  source: /note="Description of Artificial Sequence: Synthetic peptide"
  MOD_RES (11)..(11): Citrulline
QSGHMLLNLSXGKQDF

SEQ ID NO: 1488 - protein, 16 aa, Artificial Sequence
  source: /note="Description of Artificial Sequence: Synthetic peptide"
  MOD_RES (7)..(7): Citrulline
MLLNLSXGKQDFLKEV

SEQ ID NO: 1489 - protein, 16 aa, Artificial Sequence
  source: /note="Description of Artificial Sequence: Synthetic peptide"
  MOD_RES (9)..(9): Citrulline
GSDKYFHAXGNYDAAK

SEQ ID NO: 1490 - protein, 16 aa, Artificial Sequence
  source: /note="Description of Artificial Sequence: Synthetic peptide"
  MOD_RES (5)..(5): Citrulline
  MOD_RES (13)..(13): Citrulline
YFHAXGNYDAAKXGPG

SEQ ID NO: 1491 - protein, 16 aa, Artificial Sequence
  source: /note="Description of Artificial Sequence: Synthetic peptide"
  MOD_RES (8)..(8): Citrulline
ETPQNLSXGMESFPGK

SEQ ID NO: 1492 - protein, 16 aa, Artificial Sequence
  source: /note="Description of Artificial Sequence: Synthetic peptide"
  MOD_RES (4)..(4): Citrulline
NLSXGMESFPGKVLGA

SEQ ID NO: 1493 - protein, 16 aa, Artificial Sequence
  source: /note="Description of Artificial Sequence: Synthetic peptide"
  MOD_RES (8)..(8): Citrulline
  MOD_RES (11)..(11): Citrulline
VSTWQKSXGDXTYSSM

SEQ ID NO: 1494 - protein, 16 aa, Artificial Sequence
  source: /note="Description of Artificial Sequence: Synthetic peptide"
  MOD_RES (13)..(13): Citrulline
LQSHPSTDGGLAXGAY

SEQ ID NO: 1495 - protein, 16 aa, Artificial Sequence
  source: /note="Description of Artificial Sequence: Synthetic peptide"
  MOD_RES (9)..(9): Citrulline
  MOD_RES (15)..(15): Citrulline
PSTDGGLAXGAYSPXP

SEQ ID NO: 1496 - protein, 16 aa, Artificial Sequence
  source: /note="Description of Artificial Sequence: Synthetic peptide"
  MOD_RES (5)..(5): Citrulline
  MOD_RES (11)..(11): Citrulline
GGLAXGAYSPXPPSIS

SEQ ID NO: 1497 - protein, 16 aa, Artificial Sequence
  source: /note="Description of Artificial Sequence: Synthetic peptide"
  MOD_RES (9)..(9): Citrulline
VAEPSVPYXGTVFAMD

SEQ ID NO: 1498 - protein, 16 aa, Artificial Sequence
  source: /note="Description of Artificial Sequence: Synthetic peptide"
  MOD_RES (5)..(5): Citrulline
  MOD_RES (14)..(14): Citrulline
SVPYXGTVFAMDPXNG

SEQ ID NO: 1499 - protein, 16 aa, Artificial Sequence
  source: /note="Description of Artificial Sequence: Synthetic peptide"
  MOD_RES (11)..(11): Citrulline
ELQLHEAFKHXGEKLF

SEQ ID NO: 1500 - protein, 16 aa, Artificial Sequence
  source: /note="Description of Artificial Sequence: Synthetic peptide"
  MOD_RES (7)..(7): Citrulline
HEAFKHXGEKLFVCEE

SEQ ID NO: 1501 - protein, 16 aa, Artificial Sequence
  source: /note="Description of Artificial Sequence: Synthetic peptide"
  MOD_RES (7)..(7): Citrulline
  MOD_RES (10)..(10): Citrulline
TISDLSXSSXGELIPI

SEQ ID NO: 1502 - protein, 16 aa, Artificial Sequence
  source: /note="Description of Artificial Sequence: Synthetic peptide"
  MOD_RES (3)..(3): Citrulline
  MOD_RES (6)..(6): Citrulline
LSXSSXGELIPISPST

SEQ ID NO: 1503 - protein, 16 aa, Artificial Sequence
  source: /note="Description of Artificial Sequence: Synthetic peptide"
  MOD_RES (2)..(2): Citrulline
SXGELIPISPSTEVGG

SEQ ID NO: 1504 - protein, 16 aa, Artificial Sequence
  source: /note="Description of Artificial Sequence: Synthetic peptide"
  MOD_RES (10)..(10): Citrulline
VALTKGGEAXGELFWD

SEQ ID NO: 1505 - protein, 16 aa, Artificial Sequence
  source: /note="Description of Artificial Sequence: Synthetic peptide"
  MOD_RES (6)..(6): Citrulline
KGGEAXGELFWDDGES

SEQ ID NO: 1506 - protein, 16 aa, Artificial Sequence
  source: /note="Description of Artificial Sequence: Synthetic peptide"
  MOD_RES (2)..(2): Citrulline
AXGELFWDDGESLEVL

SEQ ID NO: 1507 - protein, 16 aa, Artificial Sequence
  source: /note="Description of Artificial Sequence: Synthetic peptide"
  MOD_RES (3)..(3): Citrulline
  MOD_RES (11)..(11): Citrulline
GSXGGSDGTPXGSPSP

SEQ ID NO: 1508 - protein, 16 aa, Artificial Sequence
  source: /note="Description of Artificial Sequence: Synthetic peptide"
  MOD_RES (8)..(8): Citrulline
  MOD_RES (14)..(14): Citrulline
GTQNNVLXGEPFIXGG

SEQ ID NO: 1509 - protein, 16 aa, Artificial Sequence
  source: /note="Description of Artificial Sequence: Synthetic peptide"
  MOD_RES (4)..(4): Citrulline
  MOD_RES (10)..(10): Citrulline
NVLXGEPFIXGGGAGF

SEQ ID NO: 1510 - protein, 16 aa, Artificial Sequence
  source: /note="Description of Artificial Sequence: Synthetic peptide"
  MOD_RES (10)..(10): Citrulline
TLNGEMAVTXGQLKNG

SEQ ID NO: 1511 - protein, 16 aa, Artificial Sequence
  source: /note="Description of Artificial Sequence: Synthetic peptide"
  MOD_RES (6)..(6): Citrulline
EMAVTXGQLKNGGLGV

SEQ ID NO: 1512 - protein, 16 aa, Artificial Sequence
  source: /note="Description of Artificial Sequence: Synthetic peptide"
  MOD_RES (2)..(2): Citrulline
TXGQLKNGGLGVVSDA

SEQ ID NO: 1513 - protein, 16 aa, Artificial Sequence
  source: /note="Description of Artificial Sequence: Synthetic peptide"
  MOD_RES (11)..(11): Citrulline
  MOD_RES (15)..(15): Citrulline
SCENTYSKANXGFIXT

SEQ ID NO: 1514 - protein, 16 aa, Artificial Sequence
  source: /note="Description of Artificial Sequence: Synthetic peptide"
  MOD_RES (7)..(7): Citrulline
  MOD_RES (11)..(11): Citrulline
TYSKANXGFIXTGGDE

SEQ ID NO: 1515 - protein, 16 aa, Artificial Sequence
  source: /note="Description of Artificial Sequence: Synthetic peptide"
  MOD_RES (9)..(9): Citrulline
  MOD_RES (15)..(15): Citrulline
NNLTSIKIXGTYSEXS

SEQ ID NO: 1516 - protein, 16 aa, Artificial Sequence
  source: /note="Description of Artificial Sequence: Synthetic peptide"
  MOD_RES (5)..(5): Citrulline
  MOD_RES (11)..(11): Citrulline
SIKIXGTYSEXSAGYL

SEQ ID NO: 1517 - protein, 16 aa, Artificial Sequence
  source: /note="Description of Artificial Sequence: Synthetic peptide"
  MOD_RES (7)..(7): Citrulline
LNADLFXGTLDPVEKA

SEQ ID NO: 1518 - protein, 16 aa, Artificial Sequence
  source: /note="Description of Artificial Sequence: Synthetic peptide"
  MOD_RES (3)..(3): Citrulline
  MOD_RES (14)..(14): Citrulline
LFXGTLDPVEKALXDA

SEQ ID NO: 1519 - protein, 16 aa, Artificial Sequence
  source: /note="Description of Artificial Sequence: Synthetic peptide"
  MOD_RES (2)..(2): Citrulline
  MOD_RES (11)..(11): Citrulline
KXGSDIIIVGXGIISA

SEQ ID NO: 1520 - protein, 16 aa, Artificial Sequence
  source: /note="Description of Artificial Sequence: Synthetic peptide"
  MOD_RES (7)..(7): Citrulline
EPGQGLXGLQGPPGKL

SEQ ID NO: 1521 - protein, 16 aa, Artificial Sequence
  source: /note="Description of Artificial Sequence: Synthetic peptide"
  MOD_RES (3)..(3): Citrulline
GLXGLQGPPGKLGPPG

SEQ ID NO: 1522 - protein, 16 aa, Artificial Sequence
  source: /note="Description of Artificial Sequence: Synthetic peptide"
  MOD_RES (11)..(11): Citrulline
  MOD_RES (14)..(14): Citrulline
SSSPHLSSKGXGSXDA

SEQ ID NO: 1523 - protein, 16 aa, Artificial Sequence
  source: /note="Description of Artificial Sequence: Synthetic peptide"
  MOD_RES (7)..(7): Citrulline
  MOD_RES (10)..(10): Citrulline
HLSSKGXGSXDALVSG

SEQ ID NO: 1524 - protein, 16 aa, Artificial Sequence
  source: /note="Description of Artificial Sequence: Synthetic peptide"
  MOD_RES (1)..(1): Citrulline
  MOD_RES (8)..(8): Citrulline
XVEDVLQXGQQLVEAA

SEQ ID NO: 1525 - protein, 16 aa, Artificial Sequence
  source: /note="Description of Artificial Sequence: Synthetic peptide"
  MOD_RES (4)..(4): Citrulline
VLQXGQQLVEAAEIDC

SEQ ID NO: 1526 - protein, 16 aa, Artificial Sequence
  source: /note="Description of Artificial Sequence: Synthetic peptide"
  MOD_RES (11)..(11): Citrulline
VQDLFDFITEXGALQE

SEQ ID NO: 1527 - protein, 16 aa, Artificial Sequence
  source: /note="Description of Artificial Sequence: Synthetic peptide"
  MOD_RES (7)..(7): Citrulline
  MOD_RES (16)..(16): Citrulline
FDFITEXGALQEELAX

SEQ ID NO: 1528 - protein, 16 aa, Artificial Sequence
  source: /note="Description of Artificial Sequence: Synthetic peptide"
  MOD_RES (9)..(9): Citrulline
VSCAYQVAXGMEYLAS

SEQ ID NO: 1529 - protein, 16 aa, Artificial Sequence
  source: /note="Description of Artificial Sequence: Synthetic peptide"
  MOD_RES (10)..(10): Citrulline
  MOD_RES (12)..(12): Citrulline
FKIEPPGLFXGXGNHP

SEQ ID NO: 1530 - protein, 16 aa, Artificial Sequence
  source: /note="Description of Artificial Sequence: Synthetic peptide"
  MOD_RES (6)..(6): Citrulline
  MOD_RES (8)..(8): Citrulline
PPGLFXGXGNHPKMGM

SEQ ID NO: 1531 - protein, 16 aa, Artificial Sequence
  source: /note="Description of Artificial Sequence: Synthetic peptide"
  MOD_RES (2)..(2): Citrulline
  MOD_RES (11)..(11): Citrulline
GXDKYGVFPLXGKILN

SEQ ID NO: 1532 - protein, 16 aa, Artificial Sequence
  source: /note="Description of Artificial Sequence: Synthetic peptide"
  MOD_RES (7)..(7): Citrulline
  MOD_RES (14)..(14): Citrulline
YGVFPLXGKILNVXEA

SEQ ID NO: 1533 - protein, 16 aa, Artificial Sequence
  source: /note="Description of Artificial Sequence: Synthetic peptide"
  MOD_RES (3)..(3): Citrulline
  MOD_RES (10)..(10): Citrulline
PLXGKILNVXEASHKQ

SEQ ID NO: 1534 - protein, 16 aa, Artificial Sequence
  source: /note="Description of Artificial Sequence: Synthetic peptide"
  MOD_RES (10)..(10): Citrulline
SMGALVACTXGTPLDT

SEQ ID NO: 1535 - protein, 16 aa, Artificial Sequence
  source: /note="Description of Artificial Sequence: Synthetic peptide"
  MOD_RES (6)..(6): Citrulline
LVACTXGTPLDTEVPM

SEQ ID NO: 1536 - protein, 16 aa, Artificial Sequence
  source: /note="Description of Artificial Sequence: Synthetic peptide"
  MOD_RES (5)..(5): Citrulline
  MOD_RES (10)..(10): Citrulline
LSLWXQSSGXGKLPPG

SEQ ID NO: 1537 - protein, 16 aa, Artificial Sequence
  source: /note="Description of Artificial Sequence: Synthetic peptide"
  MOD_RES (1)..(1): Citrulline
  MOD_RES (6)..(6): Citrulline
XQSSGXGKLPPGPTPL

SEQ ID NO: 1538 - protein, 16 aa, Artificial Sequence
  source: /note="Description of Artificial Sequence: Synthetic peptide"
  MOD_RES (2)..(2): Citrulline
GXGKLPPGPTPLPVIG

SEQ ID NO: 1539 - protein, 16 aa, Artificial Sequence
  source: /note="Description of Artificial Sequence: Synthetic peptide"
  MOD_RES (10)..(10): Citrulline
QAGAAAALGXGSALGG

SEQ ID NO: 1540 - protein, 16 aa, Artificial Sequence
  source: /note="Description of Artificial Sequence: Synthetic peptide"
  MOD_RES (6)..(6): Citrulline
  MOD_RES (16)..(16): Citrulline
AAALGXGSALGGSLNX

SEQ ID NO: 1541 - protein, 16 aa, Artificial Sequence
  source: /note="Description of Artificial Sequence: Synthetic peptide"
  MOD_RES (2)..(2): Citrulline
  MOD_RES (12)..(12): Citrulline
GXGSALGGSLNXTPTG

SEQ ID NO: 1542 - protein, 16 aa, Artificial Sequence
  source: /note="Description of Artificial Sequence: Synthetic peptide"
  MOD_RES (5)..(5): Citrulline
  MOD_RES (11)..(11): Citrulline
GGGTXGANGGXVPGNG

SEQ ID NO: 1543 - protein, 16 aa, Artificial Sequence
  source: /note="Description of Artificial Sequence: Synthetic peptide"
  MOD_RES (8)..(8): Citrulline
SMYEDISXGLQGTYQD

SEQ ID NO: 1544 - protein, 16 aa, Artificial Sequence
  source: /note="Description of Artificial Sequence: Synthetic peptide"
  MOD_RES (4)..(4): Citrulline
DISXGLQGTYQDVGSL

SEQ ID NO: 1545 - protein, 16 aa, Artificial Sequence
  source: /note="Description of Artificial Sequence: Synthetic peptide"
  MOD_RES (5)..(5): Citrulline
  MOD_RES (7)..(7): Citrulline
LQGEXVXGLKQQKASA

SEQ ID NO: 1546 - protein, 16 aa, Artificial Sequence
  source: /note="Description of Artificial Sequence: Synthetic peptide"
  MOD_RES (1)..(1): Citrulline
  MOD_RES (3)..(3): Citrulline
XVXGLKQQKASAELIE

SEQ ID NO: 1547 - protein, 16 aa, Artificial Sequence
  source: /note="Description of Artificial Sequence: Synthetic peptide"
  MOD_RES (2)..(2): Citrulline
  MOD_RES (11)..(11): Citrulline
PXGLPGEAGPXGLLGP

SEQ ID NO: 1548 - protein, 16 aa, Artificial Sequence
  source: /note="Description of Artificial Sequence: Synthetic peptide"
  MOD_RES (7)..(7): Citrulline
  MOD_RES (13)..(13): Citrulline
PGEAGPXGLLGPXGTP

SEQ ID NO: 1549 - protein, 16 aa, Artificial Sequence
  source: /note="Description of Artificial Sequence: Synthetic peptide"
  MOD_RES (3)..(3): Citrulline
  MOD_RES (9)..(9): Citrulline
GPXGLLGPXGTPGAPG

SEQ ID NO: 1550 - protein, 16 aa, Artificial Sequence
  source: /note="Description of Artificial Sequence: Synthetic peptide"
  MOD_RES (5)..(5): Citrulline
SEFKXGKLLSYLDVEG

SEQ ID NO: 1551 - protein, 16 aa, Artificial Sequence
  source: /note="Description of Artificial Sequence: Synthetic peptide"
  MOD_RES (1)..(1): Citrulline
XGKLLSYLDVEGNSIN

SEQ ID NO: 1552 - protein, 16 aa, Artificial Sequence
  source: /note="Description of Artificial Sequence: Synthetic peptide"
  MOD_RES (3)..(3): Citrulline
GNXGAPGINGTKGYPG

SEQ ID NO: 1553 - protein, 16 aa, Artificial Sequence
  source: /note="Description of Artificial Sequence: Synthetic peptide"
  MOD_RES (9)..(9): Citrulline
PGFSYPGPXGAPGEKG

SEQ ID NO: 1554 - protein, 16 aa, Artificial Sequence
  source: /note="Description of Artificial Sequence: Synthetic peptide"
  MOD_RES (8)..(8): Citrulline
  MOD_RES (11)..(11): Citrulline
PCKCSGQXGDXGPIGS

SEQ ID NO: 1555 - protein, 16 aa, Artificial Sequence
  source: /note="Description of Artificial Sequence: Synthetic peptide"
  MOD_RES (4)..(4): Citrulline
  MOD_RES (7)..(7): Citrulline
SGQXGDXGPIGSIGPK

SEQ ID NO: 1556 - protein, 16 aa, Artificial Sequence
  source: /note="Description of Artificial Sequence: Synthetic peptide"
  MOD_RES (11)..(11): Citrulline
TQGFQGCPGQXGVKGS

SEQ ID NO: 1557 - protein, 16 aa, Artificial Sequence
  source: /note="Description of Artificial Sequence: Synthetic peptide"
  MOD_RES (7)..(7): Citrulline
  MOD_RES (13)..(13): Citrulline
QGCPGQXGVKGSXGFP

SEQ ID NO: 1558 - protein, 16 aa, Artificial Sequence
  source: /note="Description of Artificial Sequence: Synthetic peptide"
  MOD_RES (3)..(3): Citrulline
  MOD_RES (9)..(9): Citrulline
GQXGVKGSXGFPGEKG

SEQ ID NO: 1559 - protein, 16 aa, Artificial Sequence
  source: /note="Description of Artificial Sequence: Synthetic peptide"
  MOD_RES (11)..(11): Citrulline
LIGEQGISGPXGSGGA

SEQ ID NO: 1560 - protein, 16 aa, Artificial Sequence
  source: /note="Description of Artificial Sequence: Synthetic peptide"
  MOD_RES (7)..(7): Citrulline
QGISGPXGSGGAAGAP

SEQ ID NO: 1561 - protein, 16 aa, Artificial Sequence
  source: /note="Description of Artificial Sequence: Synthetic peptide"
  MOD_RES (12)..(12): Citrulline
GSKEKLVDFLSXGMTQ

SEQ ID NO: 1562 - protein, 16 aa, Artificial Sequence
  source: /note="Description of Artificial Sequence: Synthetic peptide"
  MOD_RES (8)..(8): Citrulline
KLVDFLSXGMTQLQGT

SEQ ID NO: 1563 - protein, 16 aa, Artificial Sequence
  source: /note="Description of Artificial Sequence: Synthetic peptide"
  MOD_RES (8)..(8): Citrulline
  MOD_RES (16)..(16): Citrulline
TGDEAESXGHSKGWGX

SEQ ID NO: 1564 - protein, 16 aa, Artificial Sequence
  source: /note="Description of Artificial Sequence: Synthetic peptide"
  MOD_RES (4)..(4): Citrulline
  MOD_RES (12)..(12): Citrulline
AESXGHSKGWGXNYAS

SEQ ID NO: 1565 - protein, 16 aa, Artificial Sequence
  source: /note="Description of Artificial Sequence: Synthetic peptide"
  MOD_RES (9)..(10): Citrulline
YKDLPVSLXXGANPGF

SEQ ID NO: 1566 - protein, 16 aa, Artificial Sequence
  source: /note="Description of Artificial Sequence: Synthetic peptide"
  MOD_RES (5)..(6): Citrulline
PVSLXXGANPGFHEAI

SEQ ID NO: 1567 - protein, 16 aa, Artificial Sequence
  source: /note="Description of Artificial Sequence: Synthetic peptide"
  MOD_RES (11)..(11): Citrulline
EKDTLVSQLSXGKQAF

SEQ ID NO: 1568 - protein, 16 aa, Artificial Sequence
  source: /note="Description of Artificial Sequence: Synthetic peptide"
  MOD_RES (7)..(7): Citrulline
LVSQLSXGKQAFTQQI

SEQ ID NO: 1569 - protein, 16 aa, Artificial Sequence
  source: /note="Description of Artificial Sequence: Synthetic peptide"
  MOD_RES (11)..(11): Citrulline
EKEALISQLTXGKLTY

SEQ ID NO: 1570 - protein, 16 aa, Artificial Sequence
  source: /note="Description of Artificial Sequence: Synthetic peptide"
  MOD_RES (7)..(7): Citrulline
LISQLTXGKLTYTQQL

SEQ ID NO: 1571 - protein, 16 aa, Artificial Sequence
  source: /note="Description of Artificial Sequence: Synthetic peptide"
  MOD_RES (10)..(10): Citrulline
VHAVGLYGAXGGGIGD

SEQ ID NO: 1572 - protein, 16 aa, Artificial Sequence
  source: /note="Description of Artificial Sequence: Synthetic peptide"
  MOD_RES (6)..(6): Citrulline
  MOD_RES (13)..(13): Citrulline
GLYGAXGGGIGDXDGV

SEQ ID NO: 1573 - protein, 16 aa, Artificial Sequence
  source: /note="Description of Artificial Sequence: Synthetic peptide"
  MOD_RES (9)..(9): Citrulline
EALISQLTXGKLSYTQ

SEQ ID NO: 1574 - protein, 16 aa, Artificial Sequence
  source: /note="Description of Artificial Sequence: Synthetic peptide"
  MOD_RES (5)..(5): Citrulline
SQLTXGKLSYTQQMED

SEQ ID NO: 1575 - protein, 16 aa, Artificial Sequence
  source: /note="Description of Artificial Sequence: Synthetic peptide"
  MOD_RES (10)..(10): Citrulline
LKDINFKIEXGQLLAV

SEQ ID NO: 1576 - protein, 16 aa, Artificial Sequence
  source: /note="Description of Artificial Sequence: Synthetic peptide"
  MOD_RES (6)..(6): Citrulline
NFKIEXGQLLAVAGST

SEQ ID NO: 1577 - protein, 16 aa, Artificial Sequence
  source: /note="Description of Artificial Sequence: Synthetic peptide"
  MOD_RES (2)..(2): Citrulline
EXGQLLAVAGSTGAGK

SEQ ID NO: 1578 - protein, 16 aa, Artificial Sequence
  source: /note="Description of Artificial Sequence: Synthetic peptide"
  MOD_RES (14)..(14): Citrulline
NIYEPDYAKAVYSXGD

SEQ ID NO: 1579 - protein, 16 aa, Artificial Sequence
  source: /note="Description of Artificial Sequence: Synthetic peptide"
  MOD_RES (10)..(10): Citrulline
PDYAKAVYSXGDPKAP

SEQ ID NO: 1580 - protein, 16 aa, Artificial Sequence
  source: /note="Description of Artificial Sequence: Synthetic peptide"
  MOD_RES (6)..(6): Citrulline
KAVYSXGDPKAPDVYD

SEQ ID NO: 1581 - protein, 16 aa, Artificial Sequence
  source: /note="Description of Artificial Sequence: Synthetic peptide"
  MOD_RES (4)..(4): Citrulline
  MOD_RES (8)..(8): Citrulline
CEGXILAXGEINFKDI

SEQ ID NO: 1582 - protein, 16 aa, Artificial Sequence
  source: /note="Description of Artificial Sequence: Synthetic peptide"
  MOD_RES (4)..(4): Citrulline
ILAXGEINFKDIQVIV

SEQ ID NO: 1583 - protein, 16 aa, Artificial Sequence
  source: /note="Description of Artificial Sequence: Synthetic peptide"
  MOD_RES (10)..(10): Citrulline
FPFAFPGALXGSPPFE

SEQ ID NO: 1584 - protein, 16 aa, Artificial Sequence
  source: /note="Description of Artificial Sequence: Synthetic peptide"
  MOD_RES (6)..(6): Citrulline
FPGALXGSPPFEMLSP

SEQ ID NO: 1585 - protein, 16 aa, Artificial Sequence
  source: /note="Description of Artificial Sequence: Synthetic peptide"
  MOD_RES (2)..(2): Citrulline
  MOD_RES (15)..(15): Citrulline
LXGSPPFEMLSPSFXG

SEQ ID NO: 1586 - protein, 16 aa, Artificial Sequence
  source: /note="Description of Artificial Sequence: Synthetic peptide"
  MOD_RES (15)..(15): Citrulline
GGFSSGGFSGGSFSXG

SEQ ID NO: 1587 - protein, 16 aa, Artificial Sequence
  source: /note="Description of Artificial Sequence: Synthetic peptide"
  MOD_RES (11)..(11): Citrulline
SGGFSGGSFSXGSSGG

SEQ ID NO: 1588 - protein, 16 aa, Artificial Sequence
  source: /note="Description of Artificial Sequence: Synthetic peptide"
  MOD_RES (7)..(7): Citrulline
SGGSFSXGSSGGGCFG

SEQ ID NO: 1589 - protein, 16 aa, Artificial Sequence
  source: /note="Description of Artificial Sequence: Synthetic peptide"
  MOD_RES (3)..(3): Citrulline
FSXGSSGGGCFGGSSG

SEQ ID NO: 1590 - protein, 16 aa, Artificial Sequence
  source: /note="Description of Artificial Sequence: Synthetic peptide"
  MOD_RES (14)..(14): Citrulline
GYGGLGGFGGGSFXGS

SEQ ID NO: 1591 - protein, 16 aa, Artificial Sequence
  source: /note="Description of Artificial Sequence: Synthetic peptide"
  MOD_RES (10)..(10): Citrulline
LGGFGGGSFXGSYGSS

SEQ ID NO: 1592 - protein, 16 aa, Artificial Sequence
  source: /note="Description of Artificial Sequence: Synthetic peptide"
  MOD_RES (8)..(8): Citrulline
GSSGGGGXGGGSFGGG

SEQ ID NO: 1593 - protein, 16 aa, Artificial Sequence
  source: /note="Description of Artificial Sequence: Synthetic peptide"
  MOD_RES (4)..(4): Citrulline
GGGXGGGSFGGGYGGG

SEQ ID NO: 1594 - protein, 16 aa, Artificial Sequence
  source: /note="Description of Artificial Sequence: Synthetic peptide"
  MOD_RES (5)..(5): Citrulline
AGEPXGEVLDNSFTGG

SEQ ID NO: 1595 - protein, 16 aa, Artificial Sequence
  source: /note="Description of Artificial Sequence: Synthetic peptide"
  MOD_RES (9)..(9): Citrulline
  MOD_RES (12)..(12): Citrulline
AEKSISLIXGGXSEYG

SEQ ID NO: 1596 - protein, 16 aa, Artificial Sequence
  source: /note="Description of Artificial Sequence: Synthetic peptide"
  MOD_RES (5)..(5): Citrulline
  MOD_RES (8)..(8): Citrulline
ISLIXGGXSEYGAALA

SEQ ID NO: 1597 - protein, 16 aa, Artificial Sequence
  source: /note="Description of Artificial Sequence: Synthetic peptide"
  MOD_RES (9)..(9): Citrulline
  MOD_RES (15)..(15): Citrulline
PAGNSVETXGELLSXE

SEQ ID NO: 1598 - protein, 16 aa, Artificial Sequence
  source: /note="Description of Artificial Sequence: Synthetic peptide"
  MOD_RES (5)..(5): Citrulline
  MOD_RES (11)..(11): Citrulline
SVETXGELLSXESPSG

SEQ ID NO: 1599 - protein, 16 aa, Artificial Sequence
  source: /note="Description of Artificial Sequence: Synthetic peptide"
  MOD_RES (13)..(13): Citrulline
VKCDEKVKVFSVXGTS

SEQ ID NO: 1600 - protein, 16 aa, Artificial Sequence
  source: /note="Description of Artificial Sequence: Synthetic peptide"
  MOD_RES (9)..(9): Citrulline
EKVKVFSVXGTSFDAA

SEQ ID NO: 1601 - protein, 16 aa, Artificial Sequence
  source: /note="Description of Artificial Sequence: Synthetic peptide"
  MOD_RES (5)..(5): Citrulline
VFSVXGTSFDAAATSG

SEQ ID NO: 1602 - protein, 16 aa, Artificial Sequence
  source: /note="Description of Artificial Sequence: Synthetic peptide"
  MOD_RES (7)..(7): Citrulline
VVVSGGXGLKSGENFK

SEQ ID NO: 1603 - protein, 16 aa, Artificial Sequence
  source: /note="Description of Artificial Sequence: Synthetic peptide"
  MOD_RES (3)..(3): Citrulline
GGXGLKSGENFKLLYD

SEQ ID NO: 1604 - protein, 16 aa, Artificial Sequence
  source: /note="Description of Artificial Sequence: Synthetic peptide"
  MOD_RES (3)..(3): Citrulline
  MOD_RES (11)..(11): Citrulline
QTXSVGQYDNXGSFGE

SEQ ID NO: 1605 - protein, 16 aa, Artificial Sequence
  source: /note="Description of Artificial Sequence: Synthetic peptide"
  MOD_RES (7)..(7): Citrulline
VGQYDNXGSFGELALM

SEQ ID NO: 1606 - protein, 16 aa, Artificial Sequence
  source: /note="Description of Artificial Sequence: Synthetic peptide"
  MOD_RES (7)..(7): Citrulline
AAAHGPXGLKGEKGEP

SEQ ID NO: 1607 - protein, 16 aa, Artificial Sequence
  source: /note="Description of Artificial Sequence: Synthetic peptide"
  MOD_RES (3)..(3): Citrulline
GPXGLKGEKGEPAVLE

SEQ ID NO: 1608 - protein, 16 aa, Artificial Sequence
  source: /note="Description of Artificial Sequence: Synthetic peptide"
  MOD_RES (4)..(4): Citrulline
  MOD_RES (13)..(13): Citrulline
IGPXGLPGESGPXGLL

SEQ ID NO: 1609 - protein, 16 aa, Artificial Sequence
  source: /note="Description of Artificial Sequence: Synthetic peptide"
  MOD_RES (9)..(9): Citrulline
GLPGESGPXGLLGPKG

SEQ ID NO: 1610 - protein, 16 aa, Artificial Sequence
  source: /note="Description of Artificial Sequence: Synthetic peptide"
  MOD_RES (5)..(5): Citrulline
ESGPXGLLGPKGPPGI

SEQ ID NO: 1611 - protein, 16 aa, Artificial Sequence
  source: /note="Description of Artificial Sequence: Synthetic peptide"
  MOD_RES (8)..(8): Citrulline
PLGYPGPXGVKGVDGI

SEQ ID NO: 1612 - protein, 16 aa, Artificial Sequence
  source: /note="Description of Artificial Sequence: Synthetic peptide"
  MOD_RES (4)..(4): Citrulline
  MOD_RES (13)..(13): Citrulline
PGPXGVKGVDGIXGLK

SEQ ID NO: 1613 - protein, 16 aa, Artificial Sequence
  source: /note="Description of Artificial Sequence: Synthetic peptide"
  MOD_RES (11)..(12): Citrulline
ASFSDLGAPPXXGGVL

SEQ ID NO: 1614 - protein, 16 aa, Artificial Sequence
  source: /note="Description of Artificial Sequence: Synthetic peptide"
  MOD_RES (7)..(8): Citrulline
DLGAPPXXGGVLLGPV

SEQ ID NO: 1615 - protein, 16 aa, Artificial Sequence
  source: /note="Description of Artificial Sequence: Synthetic peptide"
  MOD_RES (13)..(13): Citrulline
KYLSQQWAKASGXGEV

SEQ ID NO: 1616 - protein, 16 aa, Artificial Sequence
  source: /note="Description of Artificial Sequence: Synthetic peptide"
  MOD_RES (9)..(9): Citrulline
  MOD_RES (16)..(16): Citrulline
QQWAKASGXGEVGKLX

SEQ ID NO: 1617 - protein, 16 aa, Artificial Sequence
  source: /note="Description of Artificial Sequence: Synthetic peptide"
  MOD_RES (8)..(8): Citrulline
SFLPSSYXGKDLQENY

SEQ ID NO: 1618 - protein, 16 aa, Artificial Sequence
  source: /note="Description of Artificial Sequence: Synthetic peptide"
  MOD_RES (4)..(4): Citrulline
  MOD_RES (14)..(14): Citrulline
SSYXGKDLQENYCXNP

SEQ ID NO: 1619 - protein, 16 aa, Artificial Sequence
  source: /note="Description of Artificial Sequence: Synthetic peptide"
  MOD_RES (9)..(9): Citrulline
QYLSNMGTXGSYLLPG

SEQ ID NO: 1620 - protein, 16 aa, Artificial Sequence
  source: /note="Description of Artificial Sequence: Synthetic peptide"
  MOD_RES (5)..(5): Citrulline
NMGTXGSYLLPGMASF

SEQ ID NO: 1621 - protein, 16 aa, Artificial Sequence
  source: /note="Description of Artificial Sequence: Synthetic peptide"
  MOD_RES (12)..(12): Citrulline
TTPIEAASSGTXGLKA

SEQ ID NO: 1622 - protein, 16 aa, Artificial Sequence
  source: /note="Description of Artificial Sequence: Synthetic peptide"
  MOD_RES (8)..(8): Citrulline
EAASSGTXGLKAKFES

SEQ ID NO: 1623 - protein, 16 aa, Artificial Sequence
  source: /note="Description of Artificial Sequence: Synthetic peptide"
  MOD_RES (6)..(7): Citrulline
DSSLTXXGQICWYQKP

SEQ ID NO: 1624 - protein, 16 aa, Artificial Sequence
  source: /note="Description of Artificial Sequence: Synthetic peptide"
  MOD_RES (2)..(3): Citrulline
TXXGQICWYQKPGVGL

SEQ ID NO: 1625 - protein, 16 aa, Artificial Sequence
  source: /note="Description of Artificial Sequence: Synthetic peptide"
  MOD_RES (12)..(12): Citrulline
FDYHTGKDIGVXGQFQ

SEQ ID NO: 1626 - protein, 16 aa, Artificial Sequence
  source: /note="Description of Artificial Sequence: Synthetic peptide"
  MOD_RES (8)..(8): Citrulline
TGKDIGVXGQFQTFNA

SEQ ID NO: 1627 - protein, 16 aa, Artificial Sequence
  source: /note="Description of Artificial Sequence: Synthetic peptide"
  MOD_RES (4)..(4): Citrulline
IGVXGQFQTFNASYDT

SEQ ID NO: 1628 - protein, 16 aa, Artificial Sequence
  source: /note="Description of Artificial Sequence: Synthetic peptide"
  MOD_RES (7)..(7): Citrulline
  MOD_RES (16)..(16): Citrulline
TSTILKXGYINKSETX

SEQ ID NO: 1629 - protein, 16 aa, Artificial Sequence
  source: /note="Description of Artificial Sequence: Synthetic peptide"
  MOD_RES (3)..(3): Citrulline
  MOD_RES (12)..(12): Citrulline
LKXGYINKSETXLGSL

SEQ ID NO: 1630 - protein, 16 aa, Artificial Sequence
  source: /note="Description of Artificial Sequence: Synthetic peptide"
  MOD_RES (13)..(13): Citrulline
YGFYGCHCGVGGXGSP

SEQ ID NO: 1631 - protein, 16 aa, Artificial Sequence
  source: /note="Description of Artificial Sequence: Synthetic peptide"
  MOD_RES (9)..(9): Citrulline
GCHCGVGGXGSPKDAT

SEQ ID NO: 1632 - protein, 16 aa, Artificial Sequence
  source: /note="Description of Artificial Sequence: Synthetic peptide"
  MOD_RES (5)..(5): Citrulline
  MOD_RES (14)..(14): Citrulline
GVGGXGSPKDATDXCC

SEQ ID NO: 1633 - protein, 16 aa, Artificial Sequence
  source: /note="Description of Artificial Sequence: Synthetic peptide"
  MOD_RES (6)..(6): Citrulline
QMKAKXGWIPASFLEP

SEQ ID NO: 1634 - protein, 16 aa, Artificial Sequence
  source: /note="Description of Artificial Sequence: Synthetic peptide"
  MOD_RES (11)..(11): Citrulline
  MOD_RES (14)..(14): Citrulline
GDLYLNDYCHXGLXLP

SEQ ID NO: 1635 - protein, 16 aa, Artificial Sequence
  source: /note="Description of Artificial Sequence: Synthetic peptide"
  MOD_RES (7)..(7): Citrulline
  MOD_RES (10)..(10): Citrulline
LNDYCHXGLXLPTSNN

SEQ ID NO: 1636 - protein, 16 aa, Artificial Sequence
  source: /note="Description of Artificial Sequence: Synthetic peptide"
  MOD_RES (10)..(10): Citrulline
  MOD_RES (13)..(13): Citrulline
LSFYYSPECXGAXGSL

SEQ ID NO: 1637 - protein, 16 aa, Artificial Sequence
  source: /note="Description of Artificial Sequence: Synthetic peptide"
  MOD_RES (6)..(6): Citrulline
  MOD_RES (9)..(9): Citrulline
YSPECXGAXGSLPTTD

SEQ ID NO: 1638 - protein, 16 aa, Artificial Sequence
  source: /note="Description of Artificial Sequence: Synthetic peptide"
  MOD_RES (2)..(2): Citrulline
  MOD_RES (5)..(5): Citrulline
CXGAXGSLPTTDAEPD

SEQ ID NO: 1639 - protein, 16 aa, Artificial Sequence
  source: /note="Description of Artificial Sequence: Synthetic peptide"
  MOD_RES (13)..(13): Citrulline
PMYVGEIAPTHLXGAL

SEQ ID NO: 1640 - protein, 16 aa, Artificial Sequence
  source: /note="Description of Artificial Sequence: Synthetic peptide"
  MOD_RES (9)..(9): Citrulline
GEIAPTHLXGALGTLN

SEQ ID NO: 1641 - protein, 16 aa, Artificial Sequence
  source: /note="Description of Artificial Sequence: Synthetic peptide"
  MOD_RES (3)..(3): Citrulline
  MOD_RES (12)..(12): Citrulline
GDXSPCGQLSGXGSCQ

SEQ ID NO: 1642 - protein, 16 aa, Artificial Sequence
  source: /note="Description of Artificial Sequence: Synthetic peptide"
  MOD_RES (8)..(8): Citrulline
PCGQLSGXGSCQNILL

SEQ ID NO: 1643 - protein, 16 aa, Artificial Sequence
  source: /note="Description of Artificial Sequence: Synthetic peptide"
  MOD_RES (8)..(8): Citrulline
TVNYFTKXGYAWDGKS

SEQ ID NO: 1644 - protein, 16 aa, Artificial Sequence
  source: /note="Description of Artificial Sequence: Synthetic peptide"
  MOD_RES (4)..(4): Citrulline
FTKXGYAWDGKSVVPE

SEQ ID NO: 1645 - protein, 16 aa, Artificial Sequence
  source: /note="Description of Artificial Sequence: Synthetic peptide"
  MOD_RES (13)..(13): Citrulline
APTATSYTPNLAXGDP

SEQ ID NO: 1646 - protein, 16 aa, Artificial Sequence
  source: /note="Description of Artificial Sequence: Synthetic peptide"
  MOD_RES (9)..(9): Citrulline
TSYTPNLAXGDPGLAT

SEQ ID NO: 1647 - protein, 16 aa, Artificial Sequence
  source: /note="Description of Artificial Sequence: Synthetic peptide"
  MOD_RES (9)..(9): Citrulline
SNSYDMFMXGEEILSG

SEQ ID NO: 1648 - protein, 16 aa, Artificial Sequence
  source: /note="Description of Artificial Sequence: Synthetic peptide"
  MOD_RES (5)..(5): Citrulline
  MOD_RES (15)..(15): Citrulline
DMFMXGEEILSGAQXI

SEQ ID NO: 1649 - protein, 16 aa, Artificial Sequence
  source: /note="Description of Artificial Sequence: Synthetic peptide"
  MOD_RES (3)..(3): Citrulline
  MOD_RES (11)..(11): Citrulline
LQXDPLLQPGXGQIMK

SEQ ID NO: 1650 - protein, 16 aa, Artificial Sequence
  source: /note="Description of Artificial Sequence: Synthetic peptide"
  MOD_RES (7)..(7): Citrulline
PLLQPGXGQIMKVDAP

SEQ ID NO: 1651 - protein, 16 aa, Artificial Sequence
  source: /note="Description of Artificial Sequence: Synthetic peptide"
  MOD_RES (3)..(3): Citrulline
PGXGQIMKVDAPWMKH

SEQ ID NO: 1652 - protein, 16 aa, Artificial Sequence
  source: /note="Description of Artificial Sequence: Synthetic peptide"
  MOD_RES (8)..(8): Citrulline
  MOD_RES (11)..(11): Citrulline
PDNMCMGXTSXGKLGG

SEQ ID NO: 1653 - protein, 16 aa, Artificial Sequence
  source: /note="Description of Artificial Sequence: Synthetic peptide"
  MOD_RES (4)..(4): Citrulline
  MOD_RES (7)..(7): Citrulline
CMGXTSXGKLGGQDSF

SEQ ID NO: 1654 - protein, 16 aa, Artificial Sequence
  source: /note="Description of Artificial Sequence: Synthetic peptide"
  MOD_RES (3)..(3): Citrulline
TSXGKLGGQDSFESIE

SEQ ID NO: 1655 - protein, 16 aa, Artificial Sequence
  source: /note="Description of Artificial Sequence: Synthetic peptide"
  MOD_RES (12)..(12): Citrulline
MDQVAPVANSYXGTLK

SEQ ID NO: 1656 - protein, 16 aa, Artificial Sequence
  source: /note="Description of Artificial Sequence: Synthetic peptide"
  MOD_RES (8)..(8): Citrulline
  MOD_RES (13)..(13): Citrulline
APVANSYXGTLKXQPA

SEQ ID NO: 1657 - protein, 16 aa, Artificial Sequence
  source: /note="Description of Artificial Sequence: Synthetic peptide"
  MOD_RES (4)..(4): Citrulline
  MOD_RES (9)..(9): Citrulline
NSYXGTLKXQPAFDTF

SEQ ID NO: 1658 - protein, 16 aa, Artificial Sequence
  source: /note="Description of Artificial Sequence: Synthetic peptide"
  MOD_RES (3)..(3): Citrulline
  MOD_RES (12)..(12): Citrulline
EDXIQVWHAEHXGMLK

SEQ ID NO: 1659 - protein, 16 aa, Artificial Sequence
  source: /note="Description of Artificial Sequence: Synthetic peptide"
  MOD_RES (8)..(8): Citrulline
QVWHAEHXGMLKDNAM

SEQ ID NO: 1660 - protein, 16 aa, Artificial Sequence
  source: /note="Description of Artificial Sequence: Synthetic peptide"
  MOD_RES (11)..(11): Citrulline
SPIDVMNSIAXGQKIP

SEQ ID NO: 1661 - protein, 16 aa, Artificial Sequence
  source: /note="Description of Artificial Sequence: Synthetic peptide"
  MOD_RES (7)..(7): Citrulline
VMNSIAXGQKIPIFSA

SEQ ID NO: 1662 - protein, 16 aa, Artificial Sequence
  source: /note="Description of Artificial Sequence: Synthetic peptide"
  MOD_RES (3)..(3): Citrulline
IAXGQKIPIFSAAGLP

SEQ ID NO: 1663 - protein, 16 aa, Artificial Sequence
  source: /note="Description of Artificial Sequence: Synthetic peptide"
  MOD_RES (2)..(2): Citrulline
  MOD_RES (6)..(6): Citrulline
GXVEGXGGSITQIPIL

SEQ ID NO: 1664 - protein, 16 aa, Artificial Sequence
  source: /note="Description of Artificial Sequence: Synthetic peptide"
  MOD_RES (2)..(2): Citrulline
GXGGSITQIPILTMPN

SEQ ID NO: 1665 - protein, 16 aa, Artificial Sequence
  source: /note="Description of Artificial Sequence: Synthetic peptide"
  MOD_RES (12)..(12): Citrulline
  MOD_RES (16)..(16): Citrulline
WTHSYKVSNYSXGSGX

SEQ ID NO: 1666 - protein, 16 aa, Artificial Sequence
  source: /note="Description of Artificial Sequence: Synthetic peptide"
  MOD_RES (8)..(8): Citrulline
  MOD_RES (12)..(12): Citrulline
YKVSNYSXGSGXCIQM

SEQ ID NO: 1667 - protein, 16 aa, Artificial Sequence
  source: /note="Description of Artificial Sequence: Synthetic peptide"
  MOD_RES (14)..(14): Citrulline
MYQDYPGNFDTSSXGS

SEQ ID NO: 1668 - protein, 16 aa, Artificial Sequence
  source: /note="Description of Artificial Sequence: Synthetic peptide"
  MOD_RES (10)..(10): Citrulline
YPGNFDTSSXGSSGSP

SEQ ID NO: 1669 - protein, 16 aa, Artificial Sequence
  source: /note="Description of Artificial Sequence: Synthetic peptide"
  MOD_RES (6)..(6): Citrulline
FDTSSXGSSGSPAHAE

SEQ ID NO: 1670 - protein, 16 aa, Artificial Sequence
  source: /note="Description of Artificial Sequence: Synthetic peptide"
  MOD_RES (10)..(10): Citrulline
NIIPPPHPLXGSQSFD

SEQ ID NO: 1671 - protein, 16 aa, Artificial Sequence
  source: /note="Description of Artificial Sequence: Synthetic peptide"
  MOD_RES (6)..(6): Citrulline
PPHPLXGSQSFDDKIG

SEQ ID NO: 1672 - protein, 16 aa, Artificial Sequence
  source: /note="Description of Artificial Sequence: Synthetic peptide"
  MOD_RES (2)..(2): Citrulline
LXGSQSFDDKIGTFYD

SEQ ID NO: 1673 - protein, 16 aa, Artificial Sequence
  source: /note="Description of Artificial Sequence: Synthetic peptide"
  MOD_RES (11)..(11): Citrulline
  MOD_RES (13)..(13): Citrulline
TLAGGNNWPLXGXKWS

SEQ ID NO: 1674 - protein, 16 aa, Artificial Sequence
  source: /note="Description of Artificial Sequence: Synthetic peptide"
  MOD_RES (7)..(7): Citrulline
  MOD_RES (9)..(9): Citrulline
GNNWPLXGXKWSLWEG

SEQ ID NO: 1675 - protein, 16 aa, Artificial Sequence
  source: /note="Description of Artificial Sequence: Synthetic peptide"
  MOD_RES (3)..(3): Citrulline
  MOD_RES (10)..(10): Citrulline
NSXIQSKTEXGSYSSY

SEQ ID NO: 1676 - protein, 16 aa, Artificial Sequence
  source: /note="Description of Artificial Sequence: Synthetic peptide"
  MOD_RES (6)..(6): Citrulline
  MOD_RES (14)..(14): Citrulline
QSKTEXGSYSSYGXES

SEQ ID NO: 1677 - protein, 16 aa, Artificial Sequence
  source: /note="Description of Artificial Sequence: Synthetic peptide"
  MOD_RES (9)..(9): Citrulline
  MOD_RES (11)..(11): Citrulline
SSSTQDPHXGXQTLGS

SEQ ID NO: 1678 - protein, 16 aa, Artificial Sequence
  source: /note="Description of Artificial Sequence: Synthetic peptide"
  MOD_RES (6)..(6): Citrulline
TLGSLXGLAKAKPEAS

SEQ ID NO: 1679 - protein, 16 aa, Artificial Sequence
  source: /note="Description of Artificial Sequence: Synthetic peptide"
  MOD_RES (2)..(2): Citrulline
LXGLAKAKPEASFQVW

SEQ ID NO: 1680 - protein, 16 aa, Artificial Sequence
  source: /note="Description of Artificial Sequence: Synthetic peptide"
  MOD_RES (13)..(13): Citrulline
FLGPGLGGKSGEXGAY

SEQ ID NO: 1681 - protein, 16 aa, Artificial Sequence
  source: /note="Description of Artificial Sequence: Synthetic peptide"
  MOD_RES (9)..(9): Citrulline
GLGGKSGEXGAYASFG

SEQ ID NO: 1682 - protein, 16 aa, Artificial Sequence
  source: /note="Description of Artificial Sequence: Synthetic peptide"
  MOD_RES (5)..(5): Citrulline
  MOD_RES (13)..(13): Citrulline
KSGEXGAYASFGXDAG

SEQ ID NO: 1683 - protein, 16 aa, Artificial Sequence
  source: /note="Description of Artificial Sequence: Synthetic peptide"
  MOD_RES (1)..(1): Citrulline
  MOD_RES (10)..(10): Citrulline
XLPVDIAYKXGYFNEE

SEQ ID NO: 1684 - protein, 16 aa, Artificial Sequence
  source: /note="Description of Artificial Sequence: Synthetic peptide"
  MOD_RES (6)..(6): Citrulline
DIAYKXGYFNEELSEI

SEQ ID NO: 1685 - protein, 16 aa, Artificial Sequence
  source: /note="Description of Artificial Sequence: Synthetic peptide"
  MOD_RES (11)..(11): Citrulline
NSAAYSSPKLXGTLPL

SEQ ID NO: 1686 - protein, 16 aa, Artificial Sequence
  source: /note="Description of Artificial Sequence: Synthetic peptide"
  MOD_RES (9)..(9): Citrulline
SDGSCAWYXGAAPPKQ

SEQ ID NO: 1687 - protein, 16 aa, Artificial Sequence
  source: /note="Description of Artificial Sequence: Synthetic peptide"
  MOD_RES (5)..(5): Citrulline
CAWYXGAAPPKQEFLD

SEQ ID NO: 1688 - protein, 16 aa, Artificial Sequence
  source: /note="Description of Artificial Sequence: Synthetic peptide"
  MOD_RES (13)..(13): Citrulline
PPNICILTEYCPXGSL

SEQ ID NO: 1689 - protein, 16 aa, Artificial Sequence
  source: /note="Description of Artificial Sequence: Synthetic peptide"
  MOD_RES (9)..(9): Citrulline
CILTEYCPXGSLQDIL

SEQ ID NO: 1690 - protein, 16 aa, Artificial Sequence
  source: /note="Description of Artificial Sequence: Synthetic peptide"
  MOD_RES (5)..(5): Citrulline
EYCPXGSLQDILENES

SEQ ID NO: 1691 - protein, 16 aa, Artificial Sequence
  source: /note="Description of Artificial Sequence: Synthetic peptide"
  MOD_RES (3)..(3): Citrulline
  MOD_RES (11)..(11): Citrulline
SFXCAEGFMLXGADIV

SEQ ID NO: 1692 - protein, 16 aa, Artificial Sequence
  source: /note="Description of Artificial Sequence: Synthetic peptide"
  MOD_RES (7)..(7): Citrulline
  MOD_RES (13)..(13): Citrulline
AEGFMLXGADIVXCDN

SEQ ID NO: 1693 - protein, 16 aa, Artificial Sequence
  source: /note="Description of Artificial Sequence: Synthetic peptide"
  MOD_RES (11)..(11): Citrulline
SFEQPEFSVSXGDQVA

SEQ ID NO: 1694 - protein, 16 aa, Artificial Sequence
  source: /note="Description of Artificial Sequence: Synthetic peptide"
  MOD_RES (7)..(7): Citrulline
  MOD_RES (13)..(13): Citrulline
PEFSVSXGDQVAXIPV

SEQ ID NO: 1695 - protein, 16 aa, Artificial Sequence
  source: /note="Description of Artificial Sequence: Synthetic peptide"
  MOD_RES (8)..(8): Citrulline
  MOD_RES (12)..(12): Citrulline
TGALVLSXGGKXNGVV

SEQ ID NO: 1696 - protein, 16 aa, Artificial Sequence
  source: /note="Description of Artificial Sequence: Synthetic peptide"
  MOD_RES (4)..(4): Citrulline
  MOD_RES (8)..(8): Citrulline
VLSXGGKXNGVVDAWA

SEQ ID NO: 1697 - protein, 16 aa, Artificial Sequence
  source: /note="Description of Artificial Sequence: Synthetic peptide"
  MOD_RES (4)..(4): Citrulline
  MOD_RES (9)..(9): Citrulline
IMVXLLLDXGAQIETK

SEQ ID NO: 1698 - protein, 16 aa, Artificial Sequence
  source: /note="Description of Artificial Sequence: Synthetic peptide"
  MOD_RES (5)..(5): Citrulline
LLLDXGAQIETKTKDE

SEQ ID NO: 1699 - protein, 16 aa, Artificial Sequence
  source: /note="Description of Artificial Sequence: Synthetic peptide"
  MOD_RES (8)..(8): Citrulline
  MOD_RES (11)..(11): Citrulline
CDVGSDGXFLXGYQQD

SEQ ID NO: 1700 - protein, 16 aa, Artificial Sequence
  source: /note="Description of Artificial Sequence: Synthetic peptide"
  MOD_RES (4)..(4): Citrulline
  MOD_RES (7)..(7): Citrulline
SDGXFLXGYQQDAYDG

SEQ ID NO: 1701 - protein, 16 aa, Artificial Sequence
  source: /note="Description of Artificial Sequence: Synthetic peptide"
  MOD_RES (3)..(3): Citrulline
FLXGYQQDAYDGKDYI

SEQ ID NO: 1702 - protein, 16 aa, Artificial Sequence
  source: /note="Description of Artificial Sequence: Synthetic peptide"
  MOD_RES (5)..(6): Citrulline
VNATXXGDLNINMTSP

SEQ ID NO: 1703 - protein, 16 aa, Artificial Sequence
  source: /note="Description of Artificial Sequence: Synthetic peptide"
  MOD_RES (1)..(2): Citrulline
XXGDLNINMTSPMGTK

SEQ ID NO: 1704 - protein, 16 aa, Artificial Sequence
  source: /note="Description of Artificial Sequence: Synthetic peptide"
  MOD_RES (9)..(9): Citrulline
  MOD_RES (14)..(14): Citrulline
DNIAHMKAXGAAVXVD

SEQ ID NO: 1705 - protein, 16 aa, Artificial Sequence
  source: /note="Description of Artificial Sequence: Synthetic peptide"
  MOD_RES (5)..(5): Citrulline
  MOD_RES (10)..(10): Citrulline
HMKAXGAAVXVDFNTM

SEQ ID NO: 1706 - protein, 16 aa, Artificial Sequence
  source: /note="Description of Artificial Sequence: Synthetic peptide"
  MOD_RES (4)..(4): Citrulline
  MOD_RES (12)..(12): Citrulline
KAKXSDELSFCXGALI

SEQ ID NO: 1707 - protein, 16 aa, Artificial Sequence
  source: /note="Description of Artificial Sequence: Synthetic peptide"
  MOD_RES (8)..(8): Citrulline
SDELSFCXGALIHNVS

SEQ ID NO: 1708 - protein, 16 aa, Artificial Sequence
  source: /note="Description of Artificial Sequence: Synthetic peptide"
  MOD_RES (4)..(4): Citrulline
SFCXGALIHNVSKEPG

SEQ ID NO: 1709 - protein, 16 aa, Artificial Sequence
  source: /note="Description of Artificial Sequence: Synthetic peptide"
  MOD_RES (7)..(7): Citrulline
GPEMLAXGMVPLDPVQ

SEQ ID NO: 1710 - protein, 16 aa, Artificial Sequence
  source: /note="Description of Artificial Sequence: Synthetic peptide"
  MOD_RES (3)..(3): Citrulline
LAXGMVPLDPVQESSS

SEQ ID NO: 1711 - protein, 16 aa, Artificial Sequence
  source: /note="Description of Artificial Sequence: Synthetic peptide"
  MOD_RES (13)..(13): Citrulline
YQCKECGKSFSQXGSL

SEQ ID NO: 1712 - protein, 16 aa, Artificial Sequence
  source: /note="Description of Artificial Sequence: Synthetic peptide"
  MOD_RES (9)..(9): Citrulline
ECGKSFSQXGSLAVHE

SEQ ID NO: 1713 - protein, 16 aa, Artificial Sequence
  source: /note="Description of Artificial Sequence: Synthetic peptide"
  MOD_RES (5)..(5): Citrulline
  MOD_RES (13)..(13): Citrulline
SFSQXGSLAVHEXLHT

SEQ ID NO: 1714 - protein, 16 aa, Artificial Sequence
  source: /note="Description of Artificial Sequence: Synthetic peptide"
  MOD_RES (13)..(13): Citrulline
YLCGQCGKSFTQXGSL

SEQ ID NO: 1715 - protein, 16 aa, Artificial Sequence
  source: /note="Description of Artificial Sequence: Synthetic peptide"
  MOD_RES (9)..(9): Citrulline
QCGKSFTQXGSLAVHQ

SEQ ID NO: 1716 - protein, 16 aa, Artificial Sequence
  source: /note="Description of Artificial Sequence: Synthetic peptide"
  MOD_RES (5)..(5): Citrulline
  MOD_RES (13)..(13): Citrulline
SFTQXGSLAVHQXSCS

SEQ ID NO: 1717 - protein, 16 aa, Artificial Sequence
  source: /note="Description of Artificial Sequence: Synthetic peptide"
  MOD_RES (12)..(12): Citrulline
KGAENFDKFFTXGQPV

SEQ ID NO: 1718 - protein, 16 aa, Artificial Sequence
  source: /note="Description of Artificial Sequence: Synthetic peptide"
  MOD_RES (8)..(8): Citrulline
NFDKFFTXGQPVLTPP

SEQ ID NO: 1719 - protein, 16 aa, Artificial Sequence
  source: /note="Description of Artificial Sequence: Synthetic peptide"
  MOD_RES (4)..(4): Citrulline
FFTXGQPVLTPPDQLV

SEQ ID NO: 1720 - protein, 16 aa, Artificial Sequence
  source: /note="Description of Artificial Sequence: Synthetic peptide"
  MOD_RES (13)..(13): Citrulline
TTPTPPGQYFYPXGGG

SEQ ID NO: 1721 - protein, 16 aa, Artificial Sequence
  source: /note="Description of Artificial Sequence: Synthetic peptide"
  MOD_RES (9)..(9): Citrulline
PPGQYFYPXGGGSGGG

SEQ ID NO: 1722 - protein, 16 aa, Artificial Sequence
  source: /note="Description of Artificial Sequence: Synthetic peptide"
  MOD_RES (5)..(5): Citrulline
YFYPXGGGSGGGAGGA

SEQ ID NO: 1723 - protein, 15 aa, Artificial Sequence
  source: /note="Description of Artificial Sequence: Synthetic peptide"
  MOD_RES (1)..(1): Citrulline
XGGGSGGGAGGAGGG

SEQ ID NO: 1724 - protein, 16 aa, Artificial Sequence
  source: /note="Description of Artificial Sequence: Synthetic peptide"
  MOD_RES (10)..(10): Citrulline
GHPAQLGLGXGASTFK

SEQ ID NO: 1725 - protein, 16 aa, Artificial Sequence
  source: /note="Description of Artificial Sequence: Synthetic peptide"
  MOD_RES (6)..(6): Citrulline
QLGLGXGASTFKEEPQ

SEQ ID NO: 1726 - protein, 16 aa, Artificial Sequence
  source: /note="Description of Artificial Sequence: Synthetic peptide"
  MOD_RES (12)..(12): Citrulline
NSSSYGDGSWKXGDKH

SEQ ID NO: 1727 - protein, 16 aa, Artificial Sequence
  source: /note="Description of Artificial Sequence: Synthetic peptide"
  MOD_RES (8)..(8): Citrulline
YGDGSWKXGDKHDFEA

SEQ ID NO: 1728 - protein, 16 aa, Artificial Sequence
  source: /note="Description of Artificial Sequence: Synthetic peptide"
  MOD_RES (4)..(4): Citrulline
SWKXGDKHDFEAKQAY

SEQ ID NO: 1729 - protein, 16 aa, Artificial Sequence
  source: /note="Description of Artificial Sequence: Synthetic peptide"
  MOD_RES (11)..(11): Citrulline
YLVDCEKKLEXGQDIK

SEQ ID NO: 1730 - protein, 16 aa, Artificial Sequence
  source: /note="Description of Artificial Sequence: Synthetic peptide"
  MOD_RES (7)..(7): Citrulline
CEKKLEXGQDIKVPPP

SEQ ID NO: 1731 - protein, 16 aa, Artificial Sequence
  source: /note="Description of Artificial Sequence: Synthetic peptide"
  MOD_RES (3)..(3): Citrulline
LEXGQDIKVPPPLPQF

SEQ ID NO: 1732 - protein, 16 aa, Artificial Sequence
  source: /note="Description of Artificial Sequence: Synthetic peptide"
  MOD_RES (11)..(11): Citrulline
KELGPYSSKTXGIEWK

SEQ ID NO: 1733 - protein, 16 aa, Artificial Sequence
  source: /note="Description of Artificial Sequence: Synthetic peptide"
  MOD_RES (7)..(7): Citrulline
  MOD_RES (13)..(13): Citrulline
PYSSKTXGIEWKXPTE

SEQ ID NO: 1734 - protein, 16 aa, Artificial Sequence
  source: /note="Description of Artificial Sequence: Synthetic peptide"
  MOD_RES (12)..(12): Citrulline
HGVLVPGGFGVXGTEG

SEQ ID NO: 1735 - protein, 16 aa, Artificial Sequence
  source: /note="Description of Artificial Sequence: Synthetic peptide"
  MOD_RES (8)..(8): Citrulline
VPGGFGVXGTEGKIQA

SEQ ID NO: 1736 - protein, 16 aa, Artificial Sequence
  source: /note="Description of Artificial Sequence: Synthetic peptide"
  MOD_RES (8)..(8): Citrulline
IFPEKNIXGFKLPDTP

SEQ ID NO: 1737 - protein, 16 aa, Artificial Sequence
  source: /note="Description of Artificial Sequence: Synthetic peptide"
  MOD_RES (9)..(9): Citrulline
HDVAGWLGXGGSMLGT

SEQ ID NO: 1738 - protein, 16 aa, Artificial Sequence
  source: /note="Description of Artificial Sequence: Synthetic peptide"
  MOD_RES (5)..(5): Citrulline
  MOD_RES (14)..(14): Citrulline
GWLGXGGSMLGTKXTL

SEQ ID NO: 1739 - protein, 16 aa, Artificial Sequence
  source: /note="Description of Artificial Sequence: Synthetic peptide"
  MOD_RES (9)..(9): Citrulline
  MOD_RES (15)..(15): Citrulline
SCEPGYDLXGAASMXC

SEQ ID NO: 1740 - protein, 16 aa, Artificial Sequence
  source: /note="Description of Artificial Sequence: Synthetic peptide"
  MOD_RES (5)..(5): Citrulline
  MOD_RES (11)..(11): Citrulline
GYDLXGAASMXCTPQG

SEQ ID NO: 1741 - protein, 16 aa, Artificial Sequence
  source: /note="Description of Artificial Sequence: Synthetic peptide"
  MOD_RES (11)..(11): Citrulline
FYSCEPGYDLXGAASM

SEQ ID NO: 1742 - protein, 16 aa, Artificial Sequence
  source: /note="Description of Artificial Sequence: Synthetic peptide"
  MOD_RES (7)..(7): Citrulline
  MOD_RES (13)..(13): Citrulline
EPGYDLXGAASMXCTP

SEQ ID NO: 1743 - protein, 16 aa, Artificial Sequence
  source: /note="Description of Artificial Sequence: Synthetic peptide"
  MOD_RES (9)..(9): Citrulline
  MOD_RES (13)..(13): Citrulline
LAIKYTDIXGQPXYPV

SEQ ID NO: 1744 - protein, 16 aa, Artificial Sequence
  source: /note="Description of Artificial Sequence: Synthetic peptide"
  MOD_RES (5)..(5): Citrulline
  MOD_RES (9)..(9): Citrulline
YTDIXGQPXYPVNSVN

SEQ ID NO: 1745 - protein, 16 aa, Artificial Sequence
  source: /note="Description of Artificial Sequence: Synthetic peptide"
  MOD_RES (9)..(9): Citrulline
  MOD_RES (16)..(16): Citrulline
EMVWEQKSXGVVMLNX

SEQ ID NO: 1746 - protein, 16 aa, Artificial Sequence
  source: /note="Description of Artificial Sequence: Synthetic peptide"
  MOD_RES (5)..(5): Citrulline
  MOD_RES (12)..(12): Citrulline
EQKSXGVVMLNXVMEK

SEQ ID NO: 1747 - protein, 16 aa, Artificial Sequence
  source: /note="Description of Artificial Sequence: Synthetic peptide"
  MOD_RES (1)..(1): Citrulline
  MOD_RES (8)..(8): Citrulline
XVVGGSLXGAQAASPA

SEQ ID NO: 1748 - protein, 16 aa, Artificial Sequence
  source: /note="Description of Artificial Sequence: Synthetic peptide"
  MOD_RES (4)..(4): Citrulline
GSLXGAQAASPAKGEP

SEQ ID NO: 1749 - protein, 16 aa, Artificial Sequence
  source: /note="Description of Artificial Sequence: Synthetic peptide"
  MOD_RES (4)..(4): Citrulline
  MOD_RES (13)..(13): Citrulline
ENGXGAILLSVAXGKV

SEQ ID NO: 1750 - protein, 16 aa, Artificial Sequence
  source: /note="Description of Artificial Sequence: Synthetic peptide"
  MOD_RES (9)..(9): Citrulline
GAILLSVAXGKVSEGI

SEQ ID NO: 1751 - protein, 16 aa, Artificial Sequence
  source: /note="Description of Artificial Sequence: Synthetic peptide"
  MOD_RES (11)..(11): Citrulline
  MOD_RES (13)..(13): Citrulline
IYKGDQGPQPXGXPQC

SEQ ID NO: 1752 - protein, 16 aa, Artificial Sequence
  source: /note="Description of Artificial Sequence: Synthetic peptide"
  MOD_RES (7)..(7): Citrulline
  MOD_RES (9)..(9): Citrulline
DQGPQPXGXPQCKLNQ

SEQ ID NO: 1753 - protein, 16 aa, Artificial Sequence
  source: /note="Description of Artificial Sequence: Synthetic peptide"
  MOD_RES (5)..(5): Citrulline
  MOD_RES (12)..(12): Citrulline
LATLXGQVLLGXGVGA

SEQ ID NO: 1754 - protein, 16 aa, Artificial Sequence
  source: /note="Description of Artificial Sequence: Synthetic peptide"
  MOD_RES (1)..(1): Citrulline
  MOD_RES (8)..(8): Citrulline
XGQVLLGXGVGAIGGQ

SEQ ID NO: 1755 - protein, 16 aa, Artificial Sequence
  source: /note="Description of Artificial Sequence: Synthetic peptide"
  MOD_RES (2)..(2): Citrulline
  MOD_RES (11)..(11): Citrulline
HXCLIYPFLMXGGKPM

SEQ ID NO: 1756 - protein, 16 aa, Artificial Sequence
  source: /note="Description of Artificial Sequence: Synthetic peptide"
  MOD_RES (7)..(7): Citrulline
IYPFLMXGGKPMPLLA

SEQ ID NO: 1757 - protein, 16 aa, Artificial Sequence
  source: /note="Description of Artificial Sequence: Synthetic peptide"
  MOD_RES (11)..(11): Citrulline
NASGASWGPPXGQYSA

SEQ ID NO: 1758 - protein, 16 aa, Artificial Sequence
  source: /note="Description of Artificial Sequence: Synthetic peptide"
  MOD_RES (7)..(7): Citrulline
ASWGPPXGQYSAGAVA

SEQ ID NO: 1759 - protein, 16 aa, Artificial Sequence
  source: /note="Description of Artificial Sequence: Synthetic peptide"
  MOD_RES (11)..(11): Citrulline
  MOD_RES (16)..(16): Citrulline
LGSPQHSPSTXGSPNX

SEQ ID NO: 1760 - protein, 16 aa, Artificial Sequence
  source: /note="Description of Artificial Sequence: Synthetic peptide"
  MOD_RES (7)..(7): Citrulline
  MOD_RES (12)..(12): Citrulline
QHSPSTXGSPNXSLPS

SEQ ID NO: 1761 - protein, 16 aa, Artificial Sequence
  source: /note="Description of Artificial Sequence: Synthetic peptide"
  MOD_RES (13)..(13): Citrulline
GIPLKPMLAHPTXGIS

SEQ ID NO: 1762 - protein, 16 aa, Artificial Sequence
  source: /note="Description of Artificial Sequence: Synthetic peptide"
  MOD_RES (9)..(9): Citrulline
KPMLAHPTXGISEVLK

SEQ ID NO: 1763 - protein, 16 aa, Artificial Sequence
  source: /note="Description of Artificial Sequence: Synthetic peptide"
  MOD_RES (11)..(11): Citrulline
SSSTFGGGSTXGGSLL

SEQ ID NO: 1764 - protein, 16 aa, Artificial Sequence
  source: /note="Description of Artificial Sequence: Synthetic peptide"
  MOD_RES (7)..(7): Citrulline
FGGGSTXGGSLLAGGG

SEQ ID NO: 1765 - protein, 16 aa, Artificial Sequence
  source: /note="Description of Artificial Sequence: Synthetic peptide"
  MOD_RES (3)..(3): Citrulline
STXGGSLLAGGGGFGG

SEQ ID NO: 1766 - protein, 16 aa, Artificial Sequence
  source: /note="Description of Artificial Sequence: Synthetic peptide"
  MOD_RES (11)..(11): Citrulline
CGSAIVGGGKXGAFSS

SEQ ID NO: 1767 - protein, 16 aa, Artificial Sequence
  source: /note="Description of Artificial Sequence: Synthetic peptide"
  MOD_RES (6)..(6): Citrulline
  MOD_RES (12)..(12): Citrulline
GGFGSXSLYNLXGNKS

SEQ ID NO: 1768 - protein, 16 aa, Artificial Sequence
  source: /note="Description of Artificial Sequence: Synthetic peptide"
  MOD_RES (2)..(2): Citrulline
  MOD_RES (8)..(8): Citrulline
SXSLYNLXGNKSISMS

SEQ ID NO: 1769 - protein, 16 aa, Artificial Sequence
  source: /note="Description of Artificial Sequence: Synthetic peptide"
  MOD_RES (12)..(12): Citrulline
KFLPVDDNFSLXGEAL

SEQ ID NO: 1770 - protein, 16 aa, Artificial Sequence
  source: /note="Description of Artificial Sequence: Synthetic peptide"
  MOD_RES (8)..(8): Citrulline
VDDNFSLXGEALQKAI

SEQ ID NO: 1771 - protein, 16 aa, Artificial Sequence
  source: /note="Description of Artificial Sequence: Synthetic peptide"
  MOD_RES (4)..(4): Citrulline
FSLXGEALQKAIEEDK

SEQ ID NO: 1772 - protein, 16 aa, Artificial Sequence
  source: /note="Description of Artificial Sequence: Synthetic peptide"
  MOD_RES (4)..(4): Citrulline
  MOD_RES (11)..(11): Citrulline
LAEXIPTLQTXGLSLS

SEQ ID NO: 1773 - protein, 16 aa, Artificial Sequence
  source: /note="Description of Artificial Sequence: Synthetic peptide"
  MOD_RES (7)..(7): Citrulline
IPTLQTXGLSLSALQD

SEQ ID NO: 1774 - protein, 16 aa, Artificial Sequence
  source: /note="Description of Artificial Sequence: Synthetic peptide"
  MOD_RES (6)..(6): Citrulline
QNQDYXGGKNSTWSGE

SEQ ID NO: 1775 - protein, 16 aa, Artificial Sequence
  source: /note="Description of Artificial Sequence: Synthetic peptide"
  MOD_RES (2)..(2): Citrulline
YXGGKNSTWSGESKTL

SEQ ID NO: 1776 - protein, 16 aa, Artificial Sequence
  source: /note="Description of Artificial Sequence: Synthetic peptide"
  MOD_RES (3)..(3): Citrulline
  MOD_RES (11)..(11): Citrulline
EGXITPELLTXGKFNT

SEQ ID NO: 1777 - protein, 16 aa, Artificial Sequence
  source: /note="Description of Artificial Sequence: Synthetic peptide"
  MOD_RES (7)..(7): Citrulline
TPELLTXGKFNTSDVS

SEQ ID NO: 1778 - protein, 16 aa, Artificial Sequence
  source: /note="Description of Artificial Sequence: Synthetic peptide"
  MOD_RES (3)..(3): Citrulline
LTXGKFNTSDVSAIEK

SEQ ID NO: 1779 - protein, 16 aa, Artificial Sequence
  source: /note="Description of Artificial Sequence: Synthetic peptide"
  MOD_RES (9)..(9): Citrulline
FTKKGFLFXGQISETL

SEQ ID NO: 1780 - protein, 16 aa, Artificial Sequence
  source: /note="Description of Artificial Sequence: Synthetic peptide"
  MOD_RES (5)..(5): Citrulline
  MOD_RES (15)..(15): Citrulline
GFLFXGQISETLKTXG

SEQ ID NO: 1781 - protein, 16 aa, Artificial Sequence
  source: /note="Description of Artificial Sequence: Synthetic peptide"
  MOD_RES (1)..(1): Citrulline
  MOD_RES (11)..(11): Citrulline
XGQISETLKTXGIFET

SEQ ID NO: 1782 - protein, 16 aa, Artificial Sequence
  source: /note="Description of Artificial Sequence: Synthetic peptide"
  MOD_RES (9)..(10): Citrulline
TLEQWIEKXXGEKLDK

SEQ ID NO: 1783 - protein, 16 aa, Artificial Sequence
  source: /note="Description of Artificial Sequence: Synthetic peptide"
  MOD_RES (5)..(6): Citrulline
WIEKXXGEKLDKVLAL

SEQ ID NO: 1784 - protein, 16 aa, Artificial Sequence
  source: /note="Description of Artificial Sequence: Synthetic peptide"
  MOD_RES (1)..(2): Citrulline
XXGEKLDKVLALELFE

SEQ ID NO: 1785 - protein, 16 aa, Artificial Sequence
  source: /note="Description of Artificial Sequence: Synthetic peptide"
  MOD_RES (13)..(13): Citrulline
TQVNSSLTSPTGXGSM

SEQ ID NO: 1786 - protein, 16 aa, Artificial Sequence
  source: /note="Description of Artificial Sequence: Synthetic peptide"
  MOD_RES (9)..(9): Citrulline
SSLTSPTGXGSMAAPS

SEQ ID NO: 1787 - protein, 16 aa, Artificial Sequence
  source: /note="Description of Artificial Sequence: Synthetic peptide"
  MOD_RES (10)..(10): Citrulline
VKGQKLIITXGLQKDY

SEQ ID NO: 1788 - protein, 16 aa, Artificial Sequence
  source: /note="Description of Artificial Sequence: Synthetic peptide"
  MOD_RES (6)..(6): Citrulline
  MOD_RES (13)..(13): Citrulline
KLIITXGLQKDYXTDL

SEQ ID NO: 1789 - protein, 16 aa, Artificial Sequence
  source: /note="Description of Artificial Sequence: Synthetic peptide"
  MOD_RES (13)..(13): Citrulline
YDGTTPLHIAAGXGST

SEQ ID NO: 1790 - protein, 16 aa, Artificial Sequence
  source: /note="Description of Artificial Sequence: Synthetic peptide"
  MOD_RES (9)..(9): Citrulline
  MOD_RES (13)..(13): Citrulline
TPLHIAAGXGSTXLAA

SEQ ID NO: 1791 - protein, 16 aa, Artificial Sequence
  source: /note="Description of Artificial Sequence: Synthetic peptide"
  MOD_RES (15)..(15): Citrulline
SSCPEPIVPGGYKIXG

SEQ ID NO: 1792 - protein, 16 aa, Artificial Sequence
  source: /note="Description of Artificial Sequence: Synthetic peptide"
  MOD_RES (11)..(11): Citrulline
EPIVPGGYKIXGSTPY

SEQ ID NO: 1793 - protein, 16 aa, Artificial Sequence
  source: /note="Description of Artificial Sequence: Synthetic peptide"
  MOD_RES (7)..(7): Citrulline
  MOD_RES (13)..(13): Citrulline
PGGYKIXGSTPYXHGD

SEQ ID NO: 1794 - protein, 16 aa, Artificial Sequence
  source: /note="Description of Artificial Sequence: Synthetic peptide"
  MOD_RES (7)..(7): Citrulline
  MOD_RES (11)..(11): Citrulline
LSQPPPXGGTXGQEPQ

SEQ ID NO: 1795 - protein, 16 aa, Artificial Sequence
  source: /note="Description of Artificial Sequence: Synthetic peptide"
  MOD_RES (3)..(3): Citrulline
  MOD_RES (7)..(7): Citrulline
PPXGGTXGQEPQMKET

SEQ ID NO: 1796 - protein, 16 aa, Artificial Sequence
  source: /note="Description of Artificial Sequence: Synthetic peptide"
  MOD_RES (3)..(3): Citrulline
GTXGQEPQMKETIMNQ

SEQ ID NO: 1797 - protein, 16 aa, Artificial Sequence
  source: /note="Description of Artificial Sequence: Synthetic peptide"
  MOD_RES (9)..(9): Citrulline
  MOD_RES (16)..(16): Citrulline
ALSGVALPXGSGIVTX

SEQ ID NO: 1798 - protein, 16 aa, Artificial Sequence
  source: /note="Description of Artificial Sequence: Synthetic peptide"
  MOD_RES (11)..(11): Citrulline
QIVYCQDQVYXGALQK

SEQ ID NO: 1799 - protein, 16 aa, Artificial Sequence
  source: /note="Description of Artificial Sequence: Synthetic peptide"
  MOD_RES (7)..(7): Citrulline
  MOD_RES (14)..(14): Citrulline
CQDQVYXGALQKVXEK

SEQ ID NO: 1800 - protein, 16 aa, Artificial Sequence
  source: /note="Description of Artificial Sequence: Synthetic peptide"
  MOD_RES (13)..(13): Citrulline
PPNICIVTEYCPXGSL

SEQ ID NO: 1801 - protein, 16 aa, Artificial Sequence
  source: /note="Description of Artificial Sequence: Synthetic peptide"
  MOD_RES (9)..(9): Citrulline
CIVTEYCPXGSLQDIL

SEQ ID NO: 1802 - protein, 16 aa, Artificial Sequence
  source: /note="Description of Artificial Sequence: Synthetic peptide"
  MOD_RES (5)..(5): Citrulline
EYCPXGSLQDILENDS

SEQ ID NO: 1803 - protein, 16 aa, Artificial Sequence
  source: /note="Description of Artificial Sequence: Synthetic peptide"
  MOD_RES (8)..(8): Citrulline
PHYYEQTXGGQVSVCP

SEQ ID NO: 1804 - protein, 16 aa, Artificial Sequence
  source: /note="Description of Artificial Sequence: Synthetic peptide"
  MOD_RES (4)..(4): Citrulline
  MOD_RES (15)..(15): Citrulline
EQTXGGQVSVCPLPXG

SEQ ID NO: 1805 - protein, 16 aa, Artificial Sequence
  source: /note="Description of Artificial Sequence: Synthetic peptide"
  MOD_RES (14)..(14): Citrulline
ATASEYTWNTKTGXGQ

SEQ ID NO: 1806 - protein, 16 aa, Artificial Sequence
  source: /note="Description of Artificial Sequence: Synthetic peptide"
  MOD_RES (10)..(10): Citrulline
  MOD_RES (16)..(16): Citrulline
EYTWNTKTGXGQFSGX

SEQ ID NO: 1807 - protein, 16 aa, Artificial Sequence
  source: /note="Description of Artificial Sequence: Synthetic peptide"
  MOD_RES (6)..(6): Citrulline
  MOD_RES (12)..(12): Citrulline
NTKTGXGQFSGXTYNP

SEQ ID NO: 1808 - protein, 16 aa, Artificial Sequence
  source: /note="Description of Artificial Sequence: Synthetic peptide"
  MOD_RES (2)..(2): Citrulline
  MOD_RES (8)..(8): Citrulline
GXGQFSGXTYNPTAKN

SEQ ID NO: 1809 - protein, 16 aa, Artificial Sequence
  source: /note="Description of Artificial Sequence: Synthetic peptide"
  MOD_RES (6)..(6): Citrulline
KKAIEXGSLMGCSIDD

SEQ ID NO: 1810 - protein, 16 aa, Artificial Sequence
  source: /note="Description of Artificial Sequence: Synthetic peptide"
  MOD_RES (10)..(10): Citrulline
VDKAEAFSGXGKIAMV

SEQ ID NO: 1811 - protein, 16 aa, Artificial Sequence
  source: /note="Description of Artificial Sequence: Synthetic peptide"
  MOD_RES (6)..(6): Citrulline
EAFSGXGKIAMVDPFF

SEQ ID NO: 1812 - protein, 16 aa, Artificial Sequence
  source: /note="Description of Artificial Sequence: Synthetic peptide"
  MOD_RES (8)..(8): Citrulline
  MOD_RES (13)..(13): Citrulline
EPGVPGSXGFPGXGIP

SEQ ID NO: 1813 - protein, 16 aa, Artificial Sequence
  source: /note="Description of Artificial Sequence: Synthetic peptide"
  MOD_RES (4)..(4): Citrulline
  MOD_RES (9)..(9): Citrulline
PGSXGFPGXGIPGPPG

SEQ ID NO: 1814 - protein, 16 aa, Artificial Sequence
  source: /note="Description of Artificial Sequence: Synthetic peptide"
  MOD_RES (11)..(11): Citrulline
PPGPPGPPGPXGTIGF

SEQ ID NO: 1815 - protein, 16 aa, Artificial Sequence
  source: /note="Description of Artificial Sequence: Synthetic peptide"
  MOD_RES (7)..(7): Citrulline
PGPPGPXGTIGFHDGD

SEQ ID NO: 1816 - protein, 16 aa, Artificial Sequence
  source: /note="Description of Artificial Sequence: Synthetic peptide"
  MOD_RES (3)..(3): Citrulline
GPXGTIGFHDGDPLCP

SEQ ID NO: 1817 - protein, 16 aa, Artificial Sequence
  source: /note="Description of Artificial Sequence: Synthetic peptide"
  MOD_RES (2)..(2): Citrulline
  MOD_RES (11)..(11): Citrulline
PXGPQGLPGSXGELGP

SEQ ID NO: 1818 - protein, 16 aa, Artificial Sequence
  source: /note="Description of Artificial Sequence: Synthetic peptide"
  MOD_RES (12)..(12): Citrulline
GENGFPGQMGIXGLPG

SEQ ID NO: 1819 - protein, 16 aa, Artificial Sequence
  source: /note="Description of Artificial Sequence: Synthetic peptide"
  MOD_RES (8)..(8): Citrulline
FPGQMGIXGLPGIKGP

SEQ ID NO: 1820 - protein, 16 aa, Artificial Sequence
  source: /note="Description of Artificial Sequence: Synthetic peptide"
  MOD_RES (4)..(4): Citrulline
  MOD_RES (13)..(13): Citrulline
VGPXGLPGEPGPXGLL

SEQ ID NO: 1821 - protein, 16 aa, Artificial Sequence
  source: /note="Description of Artificial Sequence: Synthetic peptide"
  MOD_RES (9)..(9): Citrulline
GLPGEPGPXGLLGPKG

SEQ ID NO: 1822 - protein, 16 aa, Artificial Sequence
  source: /note="Description of Artificial Sequence: Synthetic peptide"
  MOD_RES (5)..(5): Citrulline
EPGPXGLLGPKGPPGP

SEQ ID NO: 1823 - protein, 16 aa, Artificial Sequence
  source: /note="Description of Artificial Sequence: Synthetic peptide"
  MOD_RES (8)..(8): Citrulline
PIGYPGPXGVKGADGI

SEQ ID NO: 1824 - protein, 16 aa, Artificial Sequence
  source: /note="Description of Artificial Sequence: Synthetic peptide"
  MOD_RES (4)..(4): Citrulline
  MOD_RES (13)..(13): Citrulline
PGPXGVKGADGIXGLK

SEQ ID NO: 1825 - protein, 16 aa, Artificial Sequence
  source: /note="Description of Artificial Sequence: Synthetic peptide"
  MOD_RES (7)..(7): Citrulline
DGEPGPXGQQGLFGQK

SEQ ID NO: 1826 - protein, 16 aa, Artificial Sequence
  source: /note="Description of Artificial Sequence: Synthetic peptide"
  MOD_RES (3)..(3): Citrulline
GPXGQQGLFGQKGDEG

SEQ ID NO: 1827 - protein, 16 aa, Artificial Sequence
  source: /note="Description of Artificial Sequence: Synthetic peptide"
  MOD_RES (5)..(5): Citrulline
SEFKXGKLLSYVDAEG

SEQ ID NO: 1828 - protein, 16 aa, Artificial Sequence
  source: /note="Description of Artificial Sequence: Synthetic peptide"
  MOD_RES (1)..(1): Citrulline
XGKLLSYVDAEGNPVG

SEQ ID NO: 1829 - protein, 16 aa, Artificial Sequence
  source: /note="Description of Artificial Sequence: Synthetic peptide"
  MOD_RES (6)..(6): Citrulline
EYEEDXGKGFFPQTIT

SEQ ID NO: 1830 - protein, 16 aa, Artificial Sequence
  source: /note="Description of Artificial Sequence: Synthetic peptide"
  MOD_RES (2)..(2): Citrulline
DXGKGFFPQTITQEYE

SEQ ID NO: 1831 - protein, 16 aa, Artificial Sequence
  source: /note="Description of Artificial Sequence: Synthetic peptide"
  MOD_RES (7)..(7): Citrulline
  MOD_RES (10)..(10): Citrulline
DTPDLLXAKXGQKLQS

SEQ ID NO: 1832 - protein, 16 aa, Artificial Sequence
  source: /note="Description of Artificial Sequence: Synthetic peptide"
  MOD_RES (3)..(3): Citrulline
  MOD_RES (6)..(6): Citrulline
LLXAKXGQKLQSQYLY

SEQ ID NO: 1833 - protein, 16 aa, Artificial Sequence
  source: /note="Description of Artificial Sequence: Synthetic peptide"
  MOD_RES (5)..(5): Citrulline
  MOD_RES (8)..(8): Citrulline
PGSSXGGXQGSHYEQS

SEQ ID NO: 1834 - protein, 16 aa, Artificial Sequence
  source: /note="Description of Artificial Sequence: Synthetic peptide"
  MOD_RES (11)..(11): Citrulline
DSAYHSGIQSXGSPHS

SEQ ID NO: 1835 - protein, 16 aa, Artificial Sequence
  source: /note="Description of Artificial Sequence: Synthetic peptide"
  MOD_RES (7)..(7): Citrulline
HSGIQSXGSPHSSSSY

SEQ ID NO: 1836 - protein, 16 aa, Artificial Sequence
  source: /note="Description of Artificial Sequence: Synthetic peptide"
  MOD_RES (3)..(3): Citrulline
QSXGSPHSSSSYHYQS

SEQ ID NO: 1837 - protein, 16 aa, Artificial Sequence
  source: /note="Description of Artificial Sequence: Synthetic peptide"
  MOD_RES (13)..(13): Citrulline
GISAIDGMNSIAXGQK

SEQ ID NO: 1838 - protein, 16 aa, Artificial Sequence
  source: /note="Description of Artificial Sequence: Synthetic peptide"
  MOD_RES (9)..(9): Citrulline
IDGMNSIAXGQKIPIF

SEQ ID NO: 1839 - protein, 16 aa, Artificial Sequence
  source: /note="Description of Artificial Sequence: Synthetic peptide"
  MOD_RES (5)..(5): Citrulline
NSIAXGQKIPIFSAAG

SEQ ID NO: 1840 - protein, 16 aa, Artificial Sequence
  source: /note="Description of Artificial Sequence: Synthetic peptide"
  MOD_RES (10)..(10): Citrulline
LFNPSKPFSXGSQPAD

SEQ ID NO: 1841 - protein, 16 aa, Artificial Sequence
  source: /note="Description of Artificial Sequence: Synthetic peptide"
  MOD_RES (6)..(6): Citrulline
SKPFSXGSQPADVDLM

SEQ ID NO: 1842 - protein, 16 aa, Artificial Sequence
  source: /note="Description of Artificial Sequence: Synthetic peptide"
  MOD_RES (7)..(7): Citrulline
IDSFSEXGHKPDSIKG

SEQ ID NO: 1843 - protein, 16 aa, Artificial Sequence
  source: /note="Description of Artificial Sequence: Synthetic peptide"
  MOD_RES (5)..(5): Citrulline
  MOD_RES (16)..(16): Citrulline
LVGEXGAQLSGGQKQX

SEQ ID NO: 1844 - protein, 16 aa, Artificial Sequence
  source: /note="Description of Artificial Sequence: Synthetic peptide"
  MOD_RES (10)..(10): Citrulline
PQKFPLTSFXGSPFQE

SEQ ID NO: 1845 - protein, 16 aa, Artificial Sequence
  source: /note="Description of Artificial Sequence: Synthetic peptide"
  MOD_RES (6)..(6): Citrulline
PLTSFXGSPFQEKMTA

SEQ ID NO: 1846 - protein, 16 aa, Artificial Sequence
  source: /note="Description of Artificial Sequence: Synthetic peptide"
  MOD_RES (2)..(2): Citrulline
FXGSPFQEKMTAGDNP

SEQ ID NO: 1847 - protein, 16 aa, Artificial Sequence
  source: /note="Description of Artificial Sequence: Synthetic peptide"
  MOD_RES (14)..(15): Citrulline
VAEWNEPSINFYKXXG

SEQ ID NO: 1848 - protein, 16 aa, Artificial Sequence
  source: /note="Description of Artificial Sequence: Synthetic peptide"
  MOD_RES (10)..(11): Citrulline
NEPSINFYKXXGASDL

SEQ ID NO: 1849 - protein, 16 aa, Artificial Sequence
  source: /note="Description of Artificial Sequence: Synthetic peptide"
  MOD_RES (6)..(7): Citrulline
INFYKXXGASDLSSEE

SEQ ID NO: 1850 - protein, 16 aa, Artificial Sequence
  source: /note="Description of Artificial Sequence: Synthetic peptide"
  MOD_RES (13)..(13): Citrulline
NDEYYYPKQQGLXGTF

SEQ ID NO: 1851 - protein, 16 aa, Artificial Sequence
  source: /note="Description of Artificial Sequence: Synthetic peptide"
  MOD_RES (9)..(9): Citrulline
YYPKQQGLXGTFGGNI

SEQ ID NO: 1852 - protein, 16 aa, Artificial Sequence
  source: /note="Description of Artificial Sequence: Synthetic peptide"
  MOD_RES (9)..(9): Citrulline
  MOD_RES (12)..(12): Citrulline
EGPMSKFAXGSXFSVA

SEQ ID NO: 1853 - protein, 16 aa, Artificial Sequence
  source: /note="Description of Artificial Sequence: Synthetic peptide"
  MOD_RES (5)..(5): Citrulline
  MOD_RES (8)..(8): Citrulline
SKFAXGSXFSVAEHQE

SEQ ID NO: 1854 - protein, 16 aa, Artificial Sequence
  source: /note="Description of Artificial Sequence: Synthetic peptide"
  MOD_RES (8)..(8): Citrulline
  MOD_RES (12)..(12): Citrulline
GEFGEVYXGTLXLPSQ

SEQ ID NO: 1855 - protein, 16 aa, Artificial Sequence
  source: /note="Description of Artificial Sequence: Synthetic peptide"
  MOD_RES (10)..(10): Citrulline
AMFSSHHEPXGSISKE

SEQ ID NO: 1856 - protein, 16 aa, Artificial Sequence
  source: /note="Description of Artificial Sequence: Synthetic peptide"
  MOD_RES (6)..(6): Citrulline
SHHEPXGSISKECNLV

SEQ ID NO: 1857 - protein, 16 aa, Artificial Sequence
  source: /note="Description of Artificial Sequence: Synthetic peptide"
  MOD_RES (4)..(4): Citrulline
  MOD_RES (13)..(13): Citrulline
KGDXGAIGFPGSXGLP

SEQ ID NO: 1858 - protein, 16 aa, Artificial Sequence
  source: /note="Description of Artificial Sequence: Synthetic peptide"
  MOD_RES (9)..(9): Citrulline
GAIGFPGSXGLPGYAG

SEQ ID NO: 1859 - protein, 16 aa, Artificial Sequence
  source: /note="Description of Artificial Sequence: Synthetic peptide"
  MOD_RES (11)..(11): Citrulline
FLQMNGYAVTXGLKDM

SEQ ID NO: 1860 - protein, 16 aa, Artificial Sequence
  source: /note="Description of Artificial Sequence: Synthetic peptide"
  MOD_RES (7)..(7): Citrulline
NGYAVTXGLKDMELDS

SEQ ID NO: 1861 - protein, 16 aa, Artificial Sequence
  source: /note="Description of Artificial Sequence: Synthetic peptide"
  MOD_RES (10)..(10): Citrulline
VLGLLFSLAXGSEVGN

SEQ ID NO: 1862 - protein, 16 aa, Artificial Sequence
  source: /note="Description of Artificial Sequence: Synthetic peptide"
  MOD_RES (6)..(6): Citrulline
LFSLAXGSEVGNSQAV

SEQ ID NO: 1863 - protein, 16 aa, Artificial Sequence
  source: /note="Description of Artificial Sequence: Synthetic peptide"
  MOD_RES (7)..(7): Citrulline
  MOD_RES (10)..(10): Citrulline
LPLPNLXVVXGTQVYD

SEQ ID NO: 1864 - protein, 16 aa, Artificial Sequence
  source: /note="Description of Artificial Sequence: Synthetic peptide"
  MOD_RES (3)..(3): Citrulline
  MOD_RES (6)..(6): Citrulline
NLXVVXGTQVYDGKFA

SEQ ID NO: 1865 - protein, 16 aa, Artificial Sequence
  source: /note="Description of Artificial Sequence: Synthetic peptide"
  MOD_RES (8)..(8): Citrulline
  MOD_RES (10)..(10): Citrulline
LPVGTLNXPXGSQSLL

SEQ ID NO: 1866 - protein, 16 aa, Artificial Sequence
  source: /note="Description of Artificial Sequence: Synthetic peptide"
  MOD_RES (4)..(4): Citrulline
  MOD_RES (6)..(6): Citrulline
TLNXPXGSQSLLSPSS

SEQ ID NO: 1867 - protein, 16 aa, Artificial Sequence
  source: /note="Description of Artificial Sequence: Synthetic peptide"
  MOD_RES (2)..(2): Citrulline
PXGSQSLLSPSSGYMP

SEQ ID NO: 1868 - protein, 16 aa, Artificial Sequence
  source: /note="Description of Artificial Sequence: Synthetic peptide"
  MOD_RES (7)..(7): Citrulline
ACLQASXGAQTAAATA

SEQ ID NO: 1869 - protein, 16 aa, Artificial Sequence
  source: /note="Description of Artificial Sequence: Synthetic peptide"
  MOD_RES (6)..(6): Citrulline
  MOD_RES (9)..(9): Citrulline
LAEETXGAXKGYPASP

SEQ ID NO: 1870 - protein, 16 aa, Artificial Sequence
  source: /note="Description of Artificial Sequence: Synthetic peptide"
  MOD_RES (2)..(2): Citrulline
  MOD_RES (5)..(5): Citrulline
TXGAXKGYPASPNGYP

SEQ ID NO: 1871 - protein, 16 aa, Artificial Sequence
  source: /note="Description of Artificial Sequence: Synthetic peptide"
  MOD_RES (13)..(13): Citrulline
LPEELPGVKPFTXGPY

SEQ ID NO: 1872 - protein, 16 aa, Artificial Sequence
  source: /note="Description of Artificial Sequence: Synthetic peptide"
  MOD_RES (9)..(9): Citrulline
LPGVKPFTXGPYPTMY

SEQ ID NO: 1873 - protein, 16 aa, Artificial Sequence
  source: /note="Description of Artificial Sequence: Synthetic peptide"
  MOD_RES (4)..(4): Citrulline
  MOD_RES (7)..(7): Citrulline
HLEXAFXGATVLPANT

SEQ ID NO: 1874 - protein, 16 aa, Artificial Sequence
  source: /note="Description of Artificial Sequence: Synthetic peptide"
  MOD_RES (3)..(3): Citrulline
AFXGATVLPANTPGNV

SEQ ID NO: 1875 - protein, 16 aa, Artificial Sequence
  source: /note="Description of Artificial Sequence: Synthetic peptide"
  MOD_RES (5)..(5): Citrulline
  MOD_RES (9)..(9): Citrulline
ANYEXFVPXGAFIHVD

SEQ ID NO: 1876 - protein, 16 aa, Artificial Sequence
  source: /note="Description of Artificial Sequence: Synthetic peptide"
  MOD_RES (1)..(1): Citrulline
  MOD_RES (5)..(5): Citrulline
XFVPXGAFIHVDDFPS

SEQ ID NO: 1877 - protein, 16 aa, Artificial Sequence
  source: /note="Description of Artificial Sequence: Synthetic peptide"
  MOD_RES (1)..(1): Citrulline
  MOD_RES (12)..(12): Citrulline
XVPSSASAYDQXGLAP

SEQ ID NO: 1878 - protein, 16 aa, Artificial Sequence
  source: /note="Description of Artificial Sequence: Synthetic peptide"
  MOD_RES (8)..(8): Citrulline
SASAYDQXGLAPGQEY

SEQ ID NO: 1879 - protein, 16 aa, Artificial Sequence
  source: /note="Description of Artificial Sequence: Synthetic peptide"
  MOD_RES (5)..(5): Citrulline
  MOD_RES (8)..(8): Citrulline
QVTVXALXGTSWGLPA

SEQ ID NO: 1880 - protein, 16 aa, Artificial Sequence
  source: /note="Description of Artificial Sequence: Synthetic peptide"
  MOD_RES (1)..(1): Citrulline
  MOD_RES (4)..(4): Citrulline
XALXGTSWGLPASKTI

SEQ ID NO: 1881 - protein, 16 aa, Artificial Sequence
  source: /note="Description of Artificial Sequence: Synthetic peptide"
  MOD_RES (11)..(11): Citrulline
  MOD_RES (14)..(14): Citrulline
VLHTNYTATVXGLXGP

SEQ ID NO: 1882 - protein, 16 aa, Artificial Sequence
  source: /note="Description of Artificial Sequence: Synthetic peptide"
  MOD_RES (7)..(7): Citrulline
  MOD_RES (10)..(10): Citrulline
NYTATVXGLXGPNLTS

SEQ ID NO: 1883 - protein, 16 aa, Artificial Sequence
  source: /note="Description of Artificial Sequence: Synthetic peptide"
  MOD_RES (3)..(3): Citrulline
  MOD_RES (6)..(6): Citrulline
TVXGLXGPNLTSPASI

SEQ ID NO: 1884 - protein, 16 aa, Artificial Sequence
  source: /note="Description of Artificial Sequence: Synthetic peptide"
  MOD_RES (9)..(9): Citrulline
PKFTQDTFXGSVLEGV

SEQ ID NO: 1885 - protein, 16 aa, Artificial Sequence
  source: /note="Description of Artificial Sequence: Synthetic peptide"
  MOD_RES (5)..(5): Citrulline
QDTFXGSVLEGVLPGT

SEQ ID NO: 1886 - protein, 16 aa, Artificial Sequence
  source: /note="Description of Artificial Sequence: Synthetic peptide"
  MOD_RES (5)..(5): Citrulline
  MOD_RES (11)..(11): Citrulline
CWQLXGEAGKXQVPGA

SEQ ID NO: 1887 - protein, 16 aa, Artificial Sequence
  source: /note="Description of Artificial Sequence: Synthetic peptide"
  MOD_RES (7)..(7): Citrulline
GFVSQSXGQEKSKMDC

SEQ ID NO: 1888 - protein, 16 aa, Artificial Sequence
  source: /note="Description of Artificial Sequence: Synthetic peptide"
  MOD_RES (3)..(3): Citrulline
QSXGQEKSKMDCHGGI

SEQ ID NO: 1889 - protein, 16 aa, Artificial Sequence
  source: /note="Description of Artificial Sequence: Synthetic peptide"
  MOD_RES (10)..(10): Citrulline
  MOD_RES (13)..(13): Citrulline
SGKSSSSLVXGVXLSS

SEQ ID NO: 1890 - protein, 16 aa, Artificial Sequence
  source: /note="Description of Artificial Sequence: Synthetic peptide"
  MOD_RES (6)..(6): Citrulline
  MOD_RES (9)..(9): Citrulline
SSSLVXGVXLSSSGPA

SEQ ID NO: 1891 - protein, 16 aa, Artificial Sequence
  source: /note="Description of Artificial Sequence: Synthetic peptide"
  MOD_RES (10)..(10): Citrulline
LVSCAYQVAXGMQYLE

SEQ ID NO: 1892 - protein, 16 aa, Artificial Sequence
  source: /note="Description of Artificial Sequence: Synthetic peptide"
  MOD_RES (6)..(6): Citrulline
  MOD_RES (14)..(14): Citrulline
AYQVAXGMQYLESXKC

SEQ ID NO: 1893 - protein, 16 aa, Artificial Sequence
  source: /note="Description of Artificial Sequence: Synthetic peptide"
  MOD_RES (7)..(7): Citrulline
CAYQVAXGMEYLASQK

SEQ ID NO: 1894 - protein, 16 aa, Artificial Sequence
  source: /note="Description of Artificial Sequence: Synthetic peptide"
  MOD_RES (4)..(4): Citrulline
  MOD_RES (7)..(7): Citrulline
QSSXSGXGGNFGFGDS

SEQ ID NO: 1895 - protein, 16 aa, Artificial Sequence
  source: /note="Description of Artificial Sequence: Synthetic peptide"
  MOD_RES (3)..(3): Citrulline
  MOD_RES (13)..(13): Citrulline
SGXGGNFGFGDSXGGG

SEQ ID NO: 1896 - protein, 16 aa, Artificial Sequence
  source: /note="Description of Artificial Sequence: Synthetic peptide"
  MOD_RES (4)..(4): Citrulline
  MOD_RES (14)..(14): Citrulline
SNFXGGSDGYGSGXGF

SEQ ID NO: 1897 - protein, 16 aa, Artificial Sequence
  source: /note="Description of Artificial Sequence: Synthetic peptide"
  MOD_RES (9)..(9): Citrulline
  MOD_RES (16)..(16): Citrulline
IVVDPFDPXGSGSLLX

SEQ ID NO: 1898 - protein, 16 aa, Artificial Sequence
  source: /note="Description of Artificial Sequence: Synthetic peptide"
  MOD_RES (5)..(5): Citrulline
  MOD_RES (12)..(12): Citrulline
PFDPXGSGSLLXQGAE

SEQ ID NO: 1899 - protein, 16 aa, Artificial Sequence
  source: /note="Description of Artificial Sequence: Synthetic peptide"
  MOD_RES (3)..(3): Citrulline
  MOD_RES (8)..(8): Citrulline
GLXCYPPXGVEKPLHT

SEQ ID NO: 1900 - protein, 16 aa, Artificial Sequence
  source: /note="Description of Artificial Sequence: Synthetic peptide"
  MOD_RES (4)..(4): Citrulline
YPPXGVEKPLHTLMHG

SEQ ID NO: 1901 - protein, 16 aa, Artificial Sequence
  source: /note="Description of Artificial Sequence: Synthetic peptide"
  MOD_RES (8)..(8): Citrulline
APFIPKFXGSGDTSNF

SEQ ID NO: 1902 - protein, 16 aa, Artificial Sequence
  source: /note="Description of Artificial Sequence: Synthetic peptide"
  MOD_RES (13)..(13): Citrulline
LTTKGASSFKITXGIE

SEQ ID NO: 1903 - protein, 16 aa, Artificial Sequence
  source: /note="Description of Artificial Sequence: Synthetic peptide"
  MOD_RES (9)..(9): Citrulline
GASSFKITXGIEAVGG

SEQ ID NO: 1904 - protein, 16 aa, Artificial Sequence
  source: /note="Description of Artificial Sequence: Synthetic peptide"
  MOD_RES (9)..(9): Citrulline
VAEQFLNMXGGLGLSG

SEQ ID NO: 1905 - protein, 16 aa, Artificial Sequence
  source: /note="Description of Artificial Sequence: Synthetic peptide"
  MOD_RES (5)..(5): Citrulline
FLNMXGGLGLSGAKAN

SEQ ID NO: 1906 - protein, 16 aa, Artificial Sequence
  source: /note="Description of Artificial Sequence: Synthetic peptide"
  MOD_RES (13)..(13): Citrulline
AAHGSKPNVYANXGSA

SEQ ID NO: 1907 - protein, 16 aa, Artificial Sequence
  source: /note="Description of Artificial Sequence: Synthetic peptide"
  MOD_RES (9)..(9): Citrulline
SKPNVYANXGSAEDVA

SEQ ID NO: 1908 - protein, 16 aa, Artificial Sequence
  source: /note="Description of Artificial Sequence: Synthetic peptide"
  MOD_RES (10)..(10): Citrulline
TPVTFTKWLXGEPSHE

SEQ ID NO: 1909 - protein, 16 aa, Artificial Sequence
  source: /note="Description of Artificial Sequence: Synthetic peptide"
  MOD_RES (6)..(6): Citrulline
  MOD_RES (15)..(15): Citrulline
FTKWLXGEPSHENNXQ

SEQ ID NO: 1910 - protein, 16 aa, Artificial Sequence
  source: /note="Description of Artificial Sequence: Synthetic peptide"
  MOD_RES (6)..(6): Citrulline
  MOD_RES (8)..(8): Citrulline
SFCDGXLXGHEKFGSC

SEQ ID NO: 1911 - protein, 16 aa, Artificial Sequence
  source: /note="Description of Artificial Sequence: Synthetic peptide"
  MOD_RES (2)..(2): Citrulline
  MOD_RES (4)..(4): Citrulline
GXLXGHEKFGSCQQGV

SEQ ID NO: 1912 - protein, 16 aa, Artificial Sequence
  source: /note="Description of Artificial Sequence: Synthetic peptide"
  MOD_RES (9)..(9): Citrulline
MIQGGDFTXGDGTGGK

SEQ ID NO: 1913 - protein, 16 aa, Artificial Sequence
  source: /note="Description of Artificial Sequence: Synthetic peptide"
  MOD_RES (5)..(5): Citrulline
GDFTXGDGTGGKSIYG

SEQ ID NO: 1914 - protein, 16 aa, Artificial Sequence
  source: /note="Description of Artificial Sequence: Synthetic peptide"
  MOD_RES (7)..(7): Citrulline
SVSDHSXGLVITAKEG

SEQ ID NO: 1915 - protein, 16 aa, Artificial Sequence
  source: /note="Description of Artificial Sequence: Synthetic peptide"
  MOD_RES (3)..(3): Citrulline
HSXGLVITAKEGGASI

SEQ ID NO: 1916 - protein, 16 aa, Artificial Sequence
  source: /note="Description of Artificial Sequence: Synthetic peptide"
  MOD_RES (2)..(2): Citrulline
  MOD_RES (9)..(9): Citrulline
DXAYLKLEXGNLMGGW

SEQ ID NO: 1917 - protein, 16 aa, Artificial Sequence
  source: /note="Description of Artificial Sequence: Synthetic peptide"
  MOD_RES (5)..(5): Citrulline
LKLEXGNLMGGWKYST

SEQ ID NO: 1918 - protein, 16 aa, Artificial Sequence
  source: /note="Description of Artificial Sequence: Synthetic peptide"
  MOD_RES (11)..(11): Citrulline
VKFSPGDFWGXGASAS

SEQ ID NO: 1919 - protein, 16 aa, Artificial Sequence
  source: /note="Description of Artificial Sequence: Synthetic peptide"
  MOD_RES (7)..(7): Citrulline
PGDFWGXGASASTANP

SEQ ID NO: 1920 - protein, 16 aa, Artificial Sequence
  source: /note="Description of Artificial Sequence: Synthetic peptide"
  MOD_RES (3)..(3): Citrulline
WGXGASASTANPQTPV

SEQ ID NO: 1921 - protein, 16 aa, Artificial Sequence
  source: /note="Description of Artificial Sequence: Synthetic peptide"
  MOD_RES (3)..(3): Citrulline
  MOD_RES (13)..(13): Citrulline
QLXSESIGGTPIXGAL

SEQ ID NO: 1922 - protein, 16 aa, Artificial Sequence
  source: /note="Description of Artificial Sequence: Synthetic peptide"
  MOD_RES (9)..(9): Citrulline
ESIGGTPIXGALQIEQ

SEQ ID NO: 1923 - protein, 16 aa, Artificial Sequence
  source: /note="Description of Artificial Sequence: Synthetic peptide"
  MOD_RES (5)..(5): Citrulline
GTPIXGALQIEQSEES

SEQ ID NO: 1924 - protein, 16 aa, Artificial Sequence
  source: /note="Description of Artificial Sequence: Synthetic peptide"
  MOD_RES (9)..(9): Citrulline
  MOD_RES (13)..(13): Citrulline
KYNEAKTNXSPTXGSE

SEQ ID NO: 1925 - protein, 16 aa, Artificial Sequence
  source: /note="Description of Artificial Sequence: Synthetic peptide"
  MOD_RES (5)..(5): Citrulline
  MOD_RES (9)..(9): Citrulline
AKTNXSPTXGSEFSGK

SEQ ID NO: 1926 - protein, 16 aa, Artificial Sequence
  source: /note="Description of Artificial Sequence: Synthetic peptide"
  MOD_RES (1)..(1): Citrulline
  MOD_RES (5)..(5): Citrulline
XSPTXGSEFSGKGDVP

SEQ ID NO: 1927 - protein, 16 aa, Artificial Sequence
  source: /note="Description of Artificial Sequence: Synthetic peptide"
  MOD_RES (10)..(10): Citrulline
SMKLESSHSXGSMTAL

SEQ ID NO: 1928 - protein, 16 aa, Artificial Sequence
  source: /note="Description of Artificial Sequence: Synthetic peptide"
  MOD_RES (6)..(6): Citrulline
ESSHSXGSMTALGGAS

SEQ ID NO: 1929 - protein, 16 aa, Artificial Sequence
  source: /note="Description of Artificial Sequence: Synthetic peptide"
  MOD_RES (6)..(6): Citrulline
KMAAEXGAFIDQSQSL

SEQ ID NO: 1930 - protein, 16 aa, Artificial Sequence
  source: /note="Description of Artificial Sequence: Synthetic peptide"
  MOD_RES (7)..(7): Citrulline
LCCFLLXGSLENTLGQ

SEQ ID NO: 1931 - protein, 16 aa, Artificial Sequence
  source: /note="Description of Artificial Sequence: Synthetic peptide"
  MOD_RES (3)..(3): Citrulline
LLXGSLENTLGQGLKN

SEQ ID NO: 1932 - protein, 16 aa, Artificial Sequence
  source: /note="Description of Artificial Sequence: Synthetic peptide"
  MOD_RES (12)..(12): Citrulline
AHEATKLATGPXGLLK

SEQ ID NO: 1933 - protein, 16 aa, Artificial Sequence
  source: /note="Description of Artificial Sequence: Synthetic peptide"
  MOD_RES (8)..(8): Citrulline
TKLATGPXGLLKEDAK

SEQ ID NO: 1934 - protein, 16 aa, Artificial Sequence
  source: /note="Description of Artificial Sequence: Synthetic peptide"
  MOD_RES (3)..(3): Citrulline
  MOD_RES (8)..(8): Citrulline
DKXWEEVXGALMSAFS

SEQ ID NO: 1935 - protein, 16 aa, Artificial Sequence
  source: /note="Description of Artificial Sequence: Synthetic peptide"
  MOD_RES (4)..(4): Citrulline
EEVXGALMSAFSPEKL

SEQ ID NO: 1936 - protein, 16 aa, Artificial Sequence
  source: /note="Description of Artificial Sequence: Synthetic peptide"
  MOD_RES (3)..(3): Citrulline
  MOD_RES (9)..(9): Citrulline
KPXIIAPSXGSPLPVL

SEQ ID NO: 1937 - protein, 16 aa, Artificial Sequence
  source: /note="Description of Artificial Sequence: Synthetic peptide"
  MOD_RES (5)..(5): Citrulline
IAPSXGSPLPVLSWAN

SEQ ID NO: 1938 - protein, 16 aa, Artificial Sequence
  source: /note="Description of Artificial Sequence: Synthetic peptide"
  MOD_RES (14)..(14): Citrulline
YLNTTVLPSSSSSXGS

SEQ ID NO: 1939 - protein, 16 aa, Artificial Sequence
  source: /note="Description of Artificial Sequence: Synthetic peptide"
  MOD_RES (10)..(10): Citrulline
TVLPSSSSSXGSLDSS

SEQ ID NO: 1940 - protein, 16 aa, Artificial Sequence
  source: /note="Description of Artificial Sequence: Synthetic peptide"
  MOD_RES (6)..(6): Citrulline
  MOD_RES (13)..(13): Citrulline
SSSSSXGSLDSSXSEK

SEQ ID NO: 1941 - protein, 16 aa, Artificial Sequence
  source: /note="Description of Artificial Sequence: Synthetic peptide"
  MOD_RES (12)..(12): Citrulline
PATENPGTSSKXGLQI

SEQ ID NO: 1942 - protein, 16 aa, Artificial Sequence
  source: /note="Description of Artificial Sequence: Synthetic peptide"
  MOD_RES (8)..(8): Citrulline
NPGTSSKXGLQISTTA

SEQ ID NO: 1943 - protein, 16 aa, Artificial Sequence
  source: /note="Description of Artificial Sequence: Synthetic peptide"
  MOD_RES (12)..(12): Citrulline
NSVSSSDGYGKXGQMK

SEQ ID NO: 1944 - protein, 16 aa, Artificial Sequence
  source: /note="Description of Artificial Sequence: Synthetic peptide"
  MOD_RES (8)..(8): Citrulline
SSDGYGKXGQMKPSIE

SEQ ID NO: 1945 - protein, 16 aa, Artificial Sequence
  source: /note="Description of Artificial Sequence: Synthetic peptide"
  MOD_RES (4)..(4): Citrulline
YGKXGQMKPSIESYSE

SEQ ID NO: 1946 - protein, 16 aa, Artificial Sequence
  source: /note="Description of Artificial Sequence: Synthetic peptide"
  MOD_RES (8)..(8): Citrulline
IAKQPINXGQPKPILQ

SEQ ID NO: 1947 - protein, 16 aa, Artificial Sequence
  source: /note="Description of Artificial Sequence: Synthetic peptide"
  MOD_RES (4)..(4): Citrulline
PINXGQPKPILQKQST

SEQ ID NO: 1948 - protein, 16 aa, Artificial Sequence
  source: /note="Description of Artificial Sequence: Synthetic peptide"
  MOD_RES (10)..(10): Citrulline
  MOD_RES (12)..(12): Citrulline
LQANMPSISXGXTMIH

SEQ ID NO: 1949 - protein, 16 aa, Artificial Sequence
  source: /note="Description of Artificial Sequence: Synthetic peptide"
  MOD_RES (6)..(6): Citrulline
  MOD_RES (8)..(8): Citrulline
MPSISXGXTMIHIPGV

SEQ ID NO: 1950 - protein, 16 aa, Artificial Sequence
  source: /note="Description of Artificial Sequence: Synthetic peptide"
  MOD_RES (10)..(10): Citrulline
  MOD_RES (12)..(12): Citrulline
AVNEGLEIVXGXLQNA

SEQ ID NO: 1951 - protein, 16 aa, Artificial Sequence
  source: /note="Description of Artificial Sequence: Synthetic peptide"
  MOD_RES (6)..(6): Citrulline
  MOD_RES (8)..(8): Citrulline
GLEIVXGXLQNAGLNV

SEQ ID NO: 1952 - protein, 16 aa, Artificial Sequence
  source: /note="Description of Artificial Sequence: Synthetic peptide"
  MOD_RES (2)..(2): Citrulline
  MOD_RES (4)..(4): Citrulline
VXGXLQNAGLNVTVNA

SEQ ID NO: 1953 - protein, 16 aa, Artificial Sequence
  source: /note="Description of Artificial Sequence: Synthetic peptide"
  MOD_RES (6)..(6): Citrulline
  MOD_RES (10)..(10): Citrulline
IEYCEXGSLXEVLNDT

SEQ ID NO: 1954 - protein, 16 aa, Artificial Sequence
  source: /note="Description of Artificial Sequence: Synthetic peptide"
  MOD_RES (8)..(8): Citrulline
  MOD_RES (16)..(16): Citrulline
CQFLYEVXGETYLKGX

SEQ ID NO: 1955 - protein, 16 aa, Artificial Sequence
  source: /note="Description of Artificial Sequence: Synthetic peptide"
  MOD_RES (4)..(4): Citrulline
  MOD_RES (12)..(12): Citrulline
YEVXGETYLKGXGNET

SEQ ID NO: 1956 - protein, 16 aa, Artificial Sequence
  source: /note="Description of Artificial Sequence: Synthetic peptide"
  MOD_RES (4)..(4): Citrulline
  MOD_RES (11)..(11): Citrulline
TAPXAIPTTGXGSSGV

SEQ ID NO: 1957 - protein, 16 aa, Artificial Sequence
  source: /note="Description of Artificial Sequence: Synthetic peptide"
  MOD_RES (7)..(7): Citrulline
AIPTTGXGSSGVGLTA

SEQ ID NO: 1958 - protein, 16 aa, Artificial Sequence
  source: /note="Description of Artificial Sequence: Synthetic peptide"
  MOD_RES (14)..(14): Citrulline
VGFSCQDCAPGYHXGK

SEQ ID NO: 1959 - protein, 16 aa, Artificial Sequence
  source: /note="Description of Artificial Sequence: Synthetic peptide"
  MOD_RES (10)..(10): Citrulline
CQDCAPGYHXGKLPAG

SEQ ID NO: 1960 - protein, 16 aa, Artificial Sequence
  source: /note="Description of Artificial Sequence: Synthetic peptide"
  MOD_RES (6)..(6): Citrulline
  MOD_RES (15)..(15): Citrulline
APGYHXGKLPAGSDXG

SEQ ID NO: 1961 - protein, 16 aa, Artificial Sequence
  source: /note="Description of Artificial Sequence: Synthetic peptide"
  MOD_RES (13)..(13): Citrulline
  MOD_RES (16)..(16): Citrulline
FDDLGPFSELQNXGSX

SEQ ID NO: 1962 - protein, 16 aa, Artificial Sequence
  source: /note="Description of Artificial Sequence: Synthetic peptide"
  MOD_RES (9)..(9): Citrulline
  MOD_RES (12)..(12): Citrulline
GPFSELQNXGSXHSGP

SEQ ID NO: 1963 - protein, 16 aa, Artificial Sequence
  source: /note="Description of Artificial Sequence: Synthetic peptide"
  MOD_RES (11)..(11): Citrulline
  MOD_RES (14)..(14): Citrulline
LDAATQQLLSXGVXLT

SEQ ID NO: 1964 - protein, 16 aa, Artificial Sequence
  source: /note="Description of Artificial Sequence: Synthetic peptide"
  MOD_RES (7)..(7): Citrulline
  MOD_RES (10)..(10): Citrulline
TQQLLSXGVXLTELLK

SEQ ID NO: 1965 - protein, 16 aa, Artificial Sequence
  source: /note="Description of Artificial Sequence: Synthetic peptide"
  MOD_RES (9)..(9): Citrulline
  MOD_RES (15)..(15): Citrulline
GQAGEPGPXGLLGPXG

SEQ ID NO: 1966 - protein, 16 aa, Artificial Sequence
  source: /note="Description of Artificial Sequence: Synthetic peptide"
  MOD_RES (5)..(5): Citrulline
  MOD_RES (11)..(11): Citrulline
EPGPXGLLGPXGSPGP

SEQ ID NO: 1967 - protein, 16 aa, Artificial Sequence
  source: /note="Description of Artificial Sequence: Synthetic peptide"
  MOD_RES (8)..(8): Citrulline
PPGYPGPXGVKGTSGN

SEQ ID NO: 1968 - protein, 16 aa, Artificial Sequence
  source: /note="Description of Artificial Sequence: Synthetic peptide"
  MOD_RES (4)..(4): Citrulline
  MOD_RES (13)..(13): Citrulline
PGPXGVKGTSGNXGLQ

SEQ ID NO: 1969 - protein, 16 aa, Artificial Sequence
  source: /note="Description of Artificial Sequence: Synthetic peptide"
  MOD_RES (5)..(6): Citrulline
YSTFXXGKKFSYVDAD

SEQ ID NO: 1970 - protein, 15 aa, Artificial Sequence
  source: /note="Description of Artificial Sequence: Synthetic peptide"
  MOD_RES (1)..(2): Citrulline
XXGKKFSYVDADGSP

SEQ ID NO: 1971 - protein, 16 aa, Artificial Sequence
  source: /note="Description of Artificial Sequence: Synthetic peptide"
  MOD_RES (5)..(5): Citrulline
QEVPXGSEPWKQQLTE

SEQ ID NO: 1972 - protein, 16 aa, Artificial Sequence
  source: /note="Description of Artificial Sequence: Synthetic peptide"
  MOD_RES (3)..(3): Citrulline
  MOD_RES (10)..(10): Citrulline
HCXDEMAAAXGALKKN

SEQ ID NO: 1973 - protein, 16 aa, Artificial Sequence
  source: /note="Description of Artificial Sequence: Synthetic peptide"
  MOD_RES (6)..(6): Citrulline
EMAAAXGALKKNATML

SEQ ID NO: 1974 - protein, 16 aa, Artificial Sequence
  source: /note="Description of Artificial Sequence: Synthetic peptide"
  MOD_RES (2)..(2): Citrulline
AXGALKKNATMLYTAS

SEQ ID NO: 1975 - protein, 16 aa, Artificial Sequence
  source: /note="Description of Artificial Sequence: Synthetic peptide"
  MOD_RES (11)..(11): Citrulline
  MOD_RES (14)..(14): Citrulline
LVMAGETTNSXGQXLP

SEQ ID NO: 1976 - protein, 16 aa, Artificial Sequence
  source: /note="Description of Artificial Sequence: Synthetic peptide"
  MOD_RES (7)..(7): Citrulline
  MOD_RES (10)..(10): Citrulline
GETTNSXGQXLPQKGD

SEQ ID NO: 1977 - protein, 16 aa, Artificial Sequence
  source: /note="Description of Artificial Sequence: Synthetic peptide"
  MOD_RES (1)..(1): Citrulline
  MOD_RES (7)..(7): Citrulline
XSKPLTXGAKEEHGGL

SEQ ID NO: 1978 - protein, 16 aa, Artificial Sequence
  source: /note="Description of Artificial Sequence: Synthetic peptide"
  MOD_RES (3)..(3): Citrulline
  MOD_RES (14)..(14): Citrulline
LTXGAKEEHGGLIXSP

SEQ ID NO: 1979 - protein, 16 aa, Artificial Sequence
  source: /note="Description of Artificial Sequence: Synthetic peptide"
  MOD_RES (13)..(13): Citrulline
CSCCKPCCSSSGXGSS

SEQ ID NO: 1980 - protein, 16 aa, Artificial Sequence
  source: /note="Description of Artificial Sequence: Synthetic peptide"
  MOD_RES (9)..(9): Citrulline
KPCCSSSGXGSSCCQS

SEQ ID NO: 1981 - protein, 16 aa, Artificial Sequence
  source: /note="Description of Artificial Sequence: Synthetic peptide"
  MOD_RES (11)..(11): Citrulline
  MOD_RES (15)..(15): Citrulline
MAQAASAAVTXGDLXI

SEQ ID NO: 1982 - protein, 16 aa, Artificial Sequence
  source: /note="Description of Artificial Sequence: Synthetic peptide"
  MOD_RES (7)..(7): Citrulline
  MOD_RES (11)..(11): Citrulline
ASAAVTXGDLXILPEA

SEQ ID NO: 1983 - protein, 16 aa, Artificial Sequence
  source: /note="Description of Artificial Sequence: Synthetic peptide"
  MOD_RES (11)..(11): Citrulline
VIPSELGYGEXGAPPK

SEQ ID NO: 1984 - protein, 16 aa, Artificial Sequence
  source: /note="Description of Artificial Sequence: Synthetic peptide"
  MOD_RES (7)..(7): Citrulline
ELGYGEXGAPPKIPGG

SEQ ID NO: 1985 - protein, 16 aa, Artificial Sequence
  source: /note="Description of Artificial Sequence: Synthetic peptide"
  MOD_RES (10)..(10): Citrulline
SPLNDFQVLXGTELQH

SEQ ID NO: 1986 - protein, 16 aa, Artificial Sequence
  source: /note="Description of Artificial Sequence: Synthetic peptide"
  MOD_RES (5)..(5): Citrulline
  MOD_RES (12)..(12): Citrulline
VSCFXGKGEGYXGTAN

SEQ ID NO: 1987 - protein, 16 aa, Artificial Sequence
  source: /note="Description of Artificial Sequence: Synthetic peptide"
  MOD_RES (1)..(1): Citrulline
  MOD_RES (8)..(8): Citrulline
XGKGEGYXGTANTTTA

SEQ ID NO: 1988 - protein, 16 aa, Artificial Sequence
  source: /note="Description of Artificial Sequence: Synthetic peptide"
  MOD_RES (2)..(2): Citrulline
  MOD_RES (11)..(11): Citrulline
KXFLVLNPIKXGTLEQ

SEQ ID NO: 1989 - protein, 16 aa, Artificial Sequence
  source: /note="Description of Artificial Sequence: Synthetic peptide"
  MOD_RES (7)..(7): Citrulline
VLNPIKXGTLEQIMKD

SEQ ID NO: 1990 - protein, 16 aa, Artificial Sequence
  source: /note="Description of Artificial Sequence: Synthetic peptide"
  MOD_RES (9)..(9): Citrulline
  MOD_RES (11)..(11): Citrulline
EATPLSQTXSXGSTNL

SEQ ID NO: 1991 - protein, 16 aa, Artificial Sequence
  source: /note="Description of Artificial Sequence: Synthetic peptide"
  MOD_RES (12)..(12): Citrulline
PGAAAYPSLTNXGSNF

SEQ ID NO: 1992 - protein, 16 aa, Artificial Sequence
  source: /note="Description of Artificial Sequence: Synthetic peptide"
  MOD_RES (8)..(8): Citrulline
AYPSLTNXGSNFAPET

SEQ ID NO: 1993 - protein, 16 aa, Artificial Sequence
  source: /note="Description of Artificial Sequence: Synthetic peptide"
  MOD_RES (6)..(6): Citrulline
  MOD_RES (12)..(12): Citrulline
NKSQIXTWSNSXGEGK

SEQ ID NO: 1994 - protein, 16 aa, Artificial Sequence
  source: /note="Description of Artificial Sequence: Synthetic peptide"
  MOD_RES (2)..(2): Citrulline
  MOD_RES (8)..(8): Citrulline
IXTWSNSXGEGKLFSL

SEQ ID NO: 1995 - protein, 16 aa, Artificial Sequence
  source: /note="Description of Artificial Sequence: Synthetic peptide"
  MOD_RES (4)..(4): Citrulline
  MOD_RES (10)..(10): Citrulline
PTVXAFVASXGTKQEE

SEQ ID NO: 1996 - protein, 16 aa, Artificial Sequence
  source: /note="Description of Artificial Sequence: Synthetic peptide"
  MOD_RES (6)..(6): Citrulline
AFVASXGTKQEEFESI

SEQ ID NO: 1997 - protein, 16 aa, Artificial Sequence
  source: /note="Description of Artificial Sequence: Synthetic peptide"
  MOD_RES (10)..(10): Citrulline
MEKAGLAWTXGTGVQS

SEQ ID NO: 1998 - protein, 16 aa, Artificial Sequence
  source: /note="Description of Artificial Sequence: Synthetic peptide"
  MOD_RES (6)..(6): Citrulline
GLAWTXGTGVQSEGTW

SEQ ID NO: 1999 - protein, 16 aa, Artificial Sequence
  source: /note="Description of Artificial Sequence: Synthetic peptide"
  MOD_RES (9)..(9): Citrulline
  MOD_RES (11)..(11): Citrulline
PGPGVPPKXAXGGLWD

SEQ ID NO: 2000 - protein, 16 aa, Artificial Sequence
  source: /note="Description of Artificial Sequence: Synthetic peptide"
  MOD_RES (5)..(5): Citrulline
  MOD_RES (7)..(7): Citrulline
VPPKXAXGGLWDDDDA

SEQ ID NO: 2001 - protein, 16 aa, Artificial Sequence
  source: /note="Description of Artificial Sequence: Synthetic peptide"
  MOD_RES (11)..(11): Citrulline
QPVPGGPPPSXGSVPV

SEQ ID NO: 2002 - protein, 16 aa, Artificial Sequence
  source: /note="Description of Artificial Sequence: Synthetic peptide"
  MOD_RES (7)..(7): Citrulline
  MOD_RES (14)..(14): Citrulline
GGPPPSXGSVPVLXAF

SEQ ID NO: 2003 - protein, 16 aa, Artificial Sequence
  source: /note="Description of Artificial Sequence: Synthetic peptide"
  MOD_RES (11)..(11): Citrulline
SSTVMLQLNPXGAAKP

SEQ ID NO: 2004 - protein, 16 aa, Artificial Sequence
  source: /note="Description of Artificial Sequence: Synthetic peptide"
  MOD_RES (7)..(7): Citrulline
MLQLNPXGAAKPQLSA

SEQ ID NO: 2005 - protein, 16 aa, Artificial Sequence
  source: /note="Description of Artificial Sequence: Synthetic peptide"
  MOD_RES (3)..(3): Citrulline
NPXGAAKPQLSAAQLQ

SEQ ID NO: 2006 - protein, 16 aa, Artificial Sequence
  source: /note="Description of Artificial Sequence: Synthetic peptide"
  MOD_RES (7)..(7): Citrulline
ITTILEXGEKKTAEMN

SEQ ID NO: 2007 - protein, 16 aa, Artificial Sequence
  source: /note="Description of Artificial Sequence: Synthetic peptide"
  MOD_RES (11)..(11): Citrulline
  MOD_RES (15)..(15): Citrulline
ATSSASTMPVXGGTXL

SEQ ID NO: 2008 - protein, 16 aa, Artificial Sequence
  source: /note="Description of Artificial Sequence: Synthetic peptide"
  MOD_RES (7)..(7): Citrulline
  MOD_RES (11)..(11): Citrulline
ASTMPVXGGTXLAQEA

SEQ ID NO: 2009 - protein, 16 aa, Artificial Sequence
  source: /note="Description of Artificial Sequence: Synthetic peptide"
  MOD_RES (9)..(10): Citrulline
FEATIEYSXXGDLHVT

SEQ ID NO: 2010 - protein, 16 aa, Artificial Sequence
  source: /note="Description of Artificial Sequence: Synthetic peptide"
  MOD_RES (5)..(6): Citrulline
IEYSXXGDLHVTLTSA

SEQ ID NO: 2011 - protein, 16 aa, Artificial Sequence
  source: /note="Description of Artificial Sequence: Synthetic peptide"
  MOD_RES (13)..(13): Citrulline
KCTVCKEGFSLAXGSC

SEQ ID NO: 2012 - protein, 16 aa, Artificial Sequence
  source: /note="Description of Artificial Sequence: Synthetic peptide"
  MOD_RES (9)..(9): Citrulline
CKEGFSLAXGSCIPDC

SEQ ID NO: 2013 - protein, 16 aa, Artificial Sequence
  source: /note="Description of Artificial Sequence: Synthetic peptide"
  MOD_RES (5)..(5): Citrulline
FSLAXGSCIPDCEPGT

SEQ ID NO: 2014 - protein, 16 aa, Artificial Sequence
  source: /note="Description of Artificial Sequence: Synthetic peptide"
  MOD_RES (12)..(12): Citrulline
GAIASVPNWTLXGTQL

SEQ ID NO: 2015 - protein, 16 aa, Artificial Sequence
  source: /note="Description of Artificial Sequence: Synthetic peptide"
  MOD_RES (8)..(8): Citrulline
SVPNWTLXGTQLMNGT

SEQ ID NO: 2016 - protein, 16 aa, Artificial Sequence
  source: /note="Description of Artificial Sequence: Synthetic peptide"
  MOD_RES (4)..(4): Citrulline
WTLXGTQLMNGTSMSS

SEQ ID NO: 2017 - protein, 16 aa, Artificial Sequence
  source: /note="Description of Artificial Sequence: Synthetic peptide"
  MOD_RES (10)..(10): Citrulline
DDPEAAYTTXGGKIPI

SEQ ID NO: 2018 - protein, 16 aa, Artificial Sequence
  source: /note="Description of Artificial Sequence: Synthetic peptide"
  MOD_RES (6)..(6): Citrulline
  MOD_RES (13)..(13): Citrulline
AAYTTXGGKIPIXWTS

SEQ ID NO: 2019 - protein, 16 aa, Artificial Sequence
  source: /note="Description of Artificial Sequence: Synthetic peptide"
  MOD_RES (7)..(7): Citrulline
TSLVAAXGSCIANAEE

SEQ ID NO: 2020 - protein, 16 aa, Artificial Sequence
  source: /note="Description of Artificial Sequence: Synthetic peptide"
  MOD_RES (4)..(4): Citrulline
  MOD_RES (14)..(14): Citrulline
EWTXHGSFVNKPTXGW

SEQ ID NO: 2021 - protein, 16 aa, Artificial Sequence
  source: /note="Description of Artificial Sequence: Synthetic peptide"
  MOD_RES (10)..(10): Citrulline
HGSFVNKPTXGWLHPN

SEQ ID NO: 2022 - protein, 16 aa, Artificial Sequence
  source: /note="Description of Artificial Sequence: Synthetic peptide"
  MOD_RES (6)..(6): Citrulline
VNKPTXGWLHPNDKVM

SEQ ID NO: 2023 - protein, 16 aa, Artificial Sequence
  source: /note="Description of Artificial Sequence: Synthetic peptide"
  MOD_RES (2)..(2): Citrulline
TXGWLHPNDKVMGPGV

SEQ ID NO: 2024 - protein, 16 aa, Artificial Sequence
  source: /note="Description of Artificial Sequence: Synthetic peptide"
  MOD_RES (13)..(13): Citrulline
YLTVGTDVSAKYXGAF

SEQ ID NO: 2025 - protein, 16 aa, Artificial Sequence
  source: /note="Description of Artificial Sequence: Synthetic peptide"
  MOD_RES (9)..(9): Citrulline
GTDVSAKYXGAFCEAK

SEQ ID NO: 2026 - protein, 16 aa, Artificial Sequence
  source: /note="Description of Artificial Sequence: Synthetic peptide"
  MOD_RES (10)..(10): Citrulline
QQLYKFMEDXGTPINK

SEQ ID NO: 2027 - protein, 16 aa, Artificial Sequence
  source: /note="Description of Artificial Sequence: Synthetic peptide"
  MOD_RES (6)..(6): Citrulline
KFMEDXGTPINKPPVL

SEQ ID NO: 2028 - protein, 16 aa, Artificial Sequence
  source: /note="Description of Artificial Sequence: Synthetic peptide"
  MOD_RES (3)..(3): Citrulline
  MOD_RES (16)..(16): Citrulline
GGXGGAAGGGGGWTSX

SEQ ID NO: 2029 - protein, 16 aa, Artificial Sequence
  source: /note="Description of Artificial Sequence: Synthetic peptide"
  MOD_RES (10)..(10): Citrulline
AIIAKTFKGXGITGVE

SEQ ID NO: 2030 - protein, 16 aa, Artificial Sequence
  source: /note="Description of Artificial Sequence: Synthetic peptide"
  MOD_RES (6)..(6): Citrulline
KTFKGXGITGVEDKES

SEQ ID NO: 2031 - protein, 16 aa, Artificial Sequence
  source: /note="Description of Artificial Sequence: Synthetic peptide"
  MOD_RES (10)..(10): Citrulline
  MOD_RES (16)..(16): Citrulline
PGDPVPCFIXGAPSFX

SEQ ID NO: 2032 - protein, 16 aa, Artificial Sequence
  source: /note="Description of Artificial Sequence: Synthetic peptide"
  MOD_RES (6)..(6): Citrulline
  MOD_RES (12)..(12): Citrulline
VPCFIXGAPSFXLPPD

SEQ ID NO: 2033 - protein, 16 aa, Artificial Sequence
  source: /note="Description of Artificial Sequence: Synthetic peptide"
  MOD_RES (15)..(15): Citrulline
QFTEICIQQGWKPPXG

SEQ ID NO: 2034 - protein, 16 aa, Artificial Sequence
  source: /note="Description of Artificial Sequence: Synthetic peptide"
  MOD_RES (11)..(11): Citrulline
  MOD_RES (13)..(13): Citrulline
ICIQQGWKPPXGXFDV

SEQ ID NO: 2035 - protein, 16 aa, Artificial Sequence
  source: /note="Description of Artificial Sequence: Synthetic peptide"
  MOD_RES (4)..(4): Citrulline
  MOD_RES (10)..(10): Citrulline
MPLXHWGMAXGSKPVG

SEQ ID NO: 2036 - protein, 16 aa, Artificial Sequence
  source: /note="Description of Artificial Sequence: Synthetic peptide"
  MOD_RES (6)..(6): Citrulline
HWGMAXGSKPVGDGAQ

SEQ ID NO: 2037 - protein, 16 aa, Artificial Sequence
  source: /note="Description of Artificial Sequence: Synthetic peptide"
  MOD_RES (2)..(2): Citrulline
AXGSKPVGDGAQPMAA

SEQ ID NO: 2038 - protein, 16 aa, Artificial Sequence
  source: /note="Description of Artificial Sequence: Synthetic peptide"
  MOD_RES (11)..(11): Citrulline
LINDHVKKETXGKIVD

SEQ ID NO: 2039 - protein, 16 aa, Artificial Sequence
  source: /note="Description of Artificial Sequence: Synthetic peptide"
  MOD_RES (7)..(7): Citrulline
HVKKETXGKIVDLVSE

SEQ ID NO: 2040 - protein, 16 aa, Artificial Sequence
  source: /note="Description of Artificial Sequence: Synthetic peptide"
  MOD_RES (3)..(3): Citrulline
ETXGKIVDLVSELKKD

SEQ ID NO: 2041 - protein, 16 aa, Artificial Sequence
  source: /note="Description of Artificial Sequence: Synthetic peptide"
  MOD_RES (1)..(1): Citrulline
  MOD_RES (11)..(11): Citrulline
XAAASPDYYKXGNFIP

SEQ ID NO: 2042 - protein, 16 aa, Artificial Sequence
  source: /note="Description of Artificial Sequence: Synthetic peptide"
  MOD_RES (7)..(7): Citrulline
SPDYYKXGNFIPGLKV

SEQ ID NO: 2043 - protein, 16 aa, Artificial Sequence
  source: /note="Description of Artificial Sequence: Synthetic peptide"
  MOD_RES (3)..(3): Citrulline
YKXGNFIPGLKVDGMD

SEQ ID NO: 2044 - protein, 16 aa, Artificial Sequence
  source: /note="Description of Artificial Sequence: Synthetic peptide"
  MOD_RES (7)..(7): Citrulline
  MOD_RES (10)..(10): Citrulline
VLTESAXIAXGKITDL

SEQ ID NO: 2045 - protein, 16 aa, Artificial Sequence
  source: /note="Description of Artificial Sequence: Synthetic peptide"
  MOD_RES (3)..(3): Citrulline
  MOD_RES (6)..(6): Citrulline
SAXIAXGKITDLANLS

SEQ ID NO: 2046 - protein, 16 aa, Artificial Sequence
  source: /note="Description of Artificial Sequence: Synthetic peptide"
  MOD_RES (2)..(2): Citrulline
AXGKITDLANLSAANH

SEQ ID NO: 2047 - protein, 16 aa, Artificial Sequence
  source: /note="Description of Artificial Sequence: Synthetic peptide"
  MOD_RES (11)..(11): Citrulline
TSSSPAPKAPXGSSSQ

SEQ ID NO: 2048 - protein, 16 aa, Artificial Sequence
  source: /note="Description of Artificial Sequence: Synthetic peptide"
  MOD_RES (7)..(7): Citrulline
PAPKAPXGSSSQGPSQ

SEQ ID NO: 2049 - protein, 16 aa, Artificial Sequence
  source: /note="Description of Artificial Sequence: Synthetic peptide"
  MOD_RES (3)..(3): Citrulline
APXGSSSQGPSQTSTP

SEQ ID NO: 2050 - protein, 16 aa, Artificial Sequence
  source: /note="Description of Artificial Sequence: Synthetic peptide"
  MOD_RES (3)..(3): Citrulline
  MOD_RES (13)..(13): Citrulline
KAXGIDSSSVKLXGSS

SEQ ID NO: 2051 - protein, 16 aa, Artificial Sequence
  source: /note="Description of Artificial Sequence: Synthetic peptide"
  MOD_RES (9)..(9): Citrulline
IDSSSVKLXGSSLFMD

SEQ ID NO: 2052 - protein, 16 aa, Artificial Sequence
  source: /note="Description of Artificial Sequence: Synthetic peptide"
  MOD_RES (5)..(5): Citrulline
SVKLXGSSLFMDTEKS

SEQ ID NO: 2053 - protein, 16 aa, Artificial Sequence
  source: /note="Description of Artificial Sequence: Synthetic peptide"
  MOD_RES (13)..(13): Citrulline
AAVLYSVTPPAVXGNL

SEQ ID NO: 2054 - protein, 16 aa, Artificial Sequence
  source: /note="Description of Artificial Sequence: Synthetic peptide"
  MOD_RES (9)..(9): Citrulline
YSVTPPAVXGNLALNT

SEQ ID NO: 2055 - protein, 16 aa, Artificial Sequence
  source: /note="Description of Artificial Sequence: Synthetic peptide"
  MOD_RES (9)..(9): Citrulline
VTMWEIATXGQTPYPG

SEQ ID NO: 2056 - protein, 16 aa, Artificial Sequence
  source: /note="Description of Artificial Sequence: Synthetic peptide"
  MOD_RES (8)..(8): Citrulline
  MOD_RES (10)..(10): Citrulline
VTVDPAFXTXGNANTV

SEQ ID NO: 2057 - protein, 16 aa, Artificial Sequence
  source: /note="Description of Artificial Sequence: Synthetic peptide"
  MOD_RES (4)..(4): Citrulline
  MOD_RES (6)..(6): Citrulline
PAFXTXGNANTVWVDY

SEQ ID NO: 2058 - protein, 16 aa, Artificial Sequence
  source: /note="Description of Artificial Sequence: Synthetic peptide"
  MOD_RES (9)..(9): Citrulline
IYAQKFIDXGKDFNLE

SEQ ID NO: 2059 - protein, 16 aa, Artificial Sequence
  source: /note="Description of Artificial Sequence: Synthetic peptide"
  MOD_RES (5)..(5): Citrulline
  MOD_RES (13)..(13): Citrulline
KESQXGMGYMPKXGLE

SEQ ID NO: 2060 - protein, 16 aa, Artificial Sequence
  source: /note="Description of Artificial Sequence: Synthetic peptide"
  MOD_RES (1)..(1): Citrulline
  MOD_RES (9)..(9): Citrulline
XGMGYMPKXGLEVNKC

SEQ ID NO: 2061 - protein, 16 aa, Artificial Sequence
  source: /note="Description of Artificial Sequence: Synthetic peptide"
  MOD_RES (5)..(5): Citrulline
  MOD_RES (16)..(16): Citrulline
YMPKXGLEVNKCEIAX

SEQ ID NO: 2062 - protein, 16 aa, Artificial Sequence
  source: /note="Description of Artificial Sequence: Synthetic peptide"
  MOD_RES (2)..(2): Citrulline
  MOD_RES (8)..(8): Citrulline
EXAKWPYXGGGGGGSA

SEQ ID NO: 2063 - protein, 15 aa, Artificial Sequence
  source: /note="Description of Artificial Sequence: Synthetic peptide"
  MOD_RES (4)..(4): Citrulline
WPYXGGGGGGSAGGG

SEQ ID NO: 2064 - protein, 16 aa, Artificial Sequence
  source: /note="Description of Artificial Sequence: Synthetic peptide"
  MOD_RES (2)..(2): Citrulline
  MOD_RES (10)..(10): Citrulline
GXCVGNYDNXGSFGEL

SEQ ID NO: 2065 - protein, 16 aa, Artificial Sequence
  source: /note="Description of Artificial Sequence: Synthetic peptide"
  MOD_RES (15)..(15): Citrulline
GGQTALNCGVELFKXG

SEQ ID NO: 2066 - protein, 16 aa, Artificial Sequence
  source: /note="Description of Artificial Sequence: Synthetic peptide"
  MOD_RES (11)..(11): Citrulline
ALNCGVELFKXGVLKE

SEQ ID NO: 2067 - protein, 16 aa, Artificial Sequence
  source: /note="Description of Artificial Sequence: Synthetic peptide"
  MOD_RES (9)..(9): Citrulline
TEKEQLIKXGVFKDTS

SEQ ID NO: 2068 - protein, 16 aa, Artificial Sequence
  source: /note="Description of Artificial Sequence: Synthetic peptide"
  MOD_RES (9)..(10): Citrulline
QKDHAVFTXXGEDLFM

SEQ ID NO: 2069 - protein, 16 aa, Artificial Sequence
  source: /note="Description of Artificial Sequence: Synthetic peptide"
  MOD_RES (5)..(6): Citrulline
AVFTXXGEDLFMCMDI

SEQ ID NO: 2070 - protein, 16 aa, Artificial Sequence
  source: /note="Description of Artificial Sequence: Synthetic peptide"
  MOD_RES (11)..(11): Citrulline
SVIKEGWLHKXGEYIK

SEQ ID NO: 2071 - protein, 16 aa, Artificial Sequence
  source: /note="Description of Artificial Sequence: Synthetic peptide"
  MOD_RES (7)..(7): Citrulline
  MOD_RES (15)..(15): Citrulline
EGWLHKXGEYIKTWXP

SEQ ID NO: 2072 - protein, 16 aa, Artificial Sequence
  source: /note="Description of Artificial Sequence: Synthetic peptide"
  MOD_RES (7)..(7): Citrulline
  MOD_RES (9)..(9): Citrulline
ASDGTVXLXGLPFGCS

SEQ ID NO: 2073 - protein, 16 aa, Artificial Sequence
  source: /note="Description of Artificial Sequence: Synthetic peptide"
  MOD_RES (11)..(11): Citrulline
GTPDGLGGYGXGGGGS

SEQ ID NO: 2074 - protein, 16 aa, Artificial Sequence
  source: /note="Description of Artificial Sequence: Synthetic peptide"
  MOD_RES (7)..(7): Citrulline
GLGGYGXGGGGSGGYY

SEQ ID NO: 2075 - protein, 16 aa, Artificial Sequence
  source: /note="Description of Artificial Sequence: Synthetic peptide"
  MOD_RES (10)..(10): Citrulline
  MOD_RES (12)..(12): Citrulline
PDTANDGFVXLXGLPF

SEQ ID NO: 2076 - protein, 16 aa, Artificial Sequence
  source: /note="Description of Artificial Sequence: Synthetic peptide"
  MOD_RES (6)..(6): Citrulline
  MOD_RES (8)..(8): Citrulline
NDGFVXLXGLPFGCSK

SEQ ID NO: 2077 - protein, 16 aa, Artificial Sequence
  source: /note="Description of Artificial Sequence: Synthetic peptide"
  MOD_RES (2)..(2): Citrulline
  MOD_RES (4)..(4): Citrulline
VXLXGLPFGCSKEEIV

SEQ ID NO: 2078 - protein, 16 aa, Artificial Sequence
  source: /note="Description of Artificial Sequence: Synthetic peptide"
  MOD_RES (10)..(10): Citrulline
  MOD_RES (15)..(15): Citrulline
STTGHCVHMXGLPYXA

SEQ ID NO: 2079 - protein, 16 aa, Artificial Sequence
  source: /note="Description of Artificial Sequence: Synthetic peptide"
  MOD_RES (6)..(6): Citrulline
  MOD_RES (11)..(11): Citrulline
HCVHMXGLPYXATEND

SEQ ID NO: 2080 - protein, 16 aa, Artificial Sequence
  source: /note="Description of Artificial Sequence: Synthetic peptide"
  MOD_RES (7)..(7): Citrulline
  MOD_RES (10)..(10): Citrulline
AKDQKYXIQXGALILS

SEQ ID NO: 2081 - protein, 16 aa, Artificial Sequence
  source: /note="Description of Artificial Sequence: Synthetic peptide"
  MOD_RES (3)..(3): Citrulline
  MOD_RES (6)..(6): Citrulline
KYXIQXGALILSNVQP

SEQ ID NO: 2082 - protein, 16 aa, Artificial Sequence
  source: /note="Description of Artificial Sequence: Synthetic peptide"
  MOD_RES (2)..(2): Citrulline
QXGALILSNVQPSDTM

SEQ ID NO: 2083 - protein, 16 aa, Artificial Sequence
  source: /note="Description of Artificial Sequence: Synthetic peptide"
  MOD_RES (13)..(13): Citrulline
SYCKQWLNANPSXGFL

SEQ ID NO: 2084 - protein, 16 aa, Artificial Sequence
  source: /note="Description of Artificial Sequence: Synthetic peptide"
  MOD_RES (9)..(9): Citrulline
QWLNANPSXGFLLPDS

SEQ ID NO: 2085 - protein, 16 aa, Artificial Sequence
  source: /note="Description of Artificial Sequence: Synthetic peptide"
  MOD_RES (5)..(5): Citrulline
ANPSXGFLLPDSDVEI

SEQ ID NO: 2086 - protein, 16 aa, Artificial Sequence
  source: /note="Description of Artificial Sequence: Synthetic peptide"
  MOD_RES (4)..(4): Citrulline
  MOD_RES (11)..(11): Citrulline
ECTXVAHNYLXGEPFE

SEQ ID NO: 2087 - protein, 16 aa, Artificial Sequence
  source: /note="Description of Artificial Sequence: Synthetic peptide"
  MOD_RES (7)..(7): Citrulline
VAHNYLXGEPFEEYQE

SEQ ID NO: 2088 - protein, 16 aa, Artificial Sequence
  source: /note="Description of Artificial Sequence: Synthetic peptide"
  MOD_RES (3)..(3): Citrulline
YLXGEPFEEYQESSYF

SEQ ID NO: 2089 - protein, 16 aa, Artificial Sequence
  source: /note="Description of Artificial Sequence: Synthetic peptide"
  MOD_RES (6)..(6): Citrulline
  MOD_RES (11)..(11): Citrulline
EVKVLXTSGAXGNVIV

SEQ ID NO: 2090 - protein, 16 aa, Artificial Sequence
  source: /note="Description of Artificial Sequence: Synthetic peptide"
  MOD_RES (2)..(2): Citrulline
  MOD_RES (7)..(7): Citrulline
LXTSGAXGNVIVPYKT

SEQ ID NO: 2091 - protein, 16 aa, Artificial Sequence
  source: /note="Description of Artificial Sequence: Synthetic peptide"
  MOD_RES (13)..(13): Citrulline
MESSEVCTNTYAXGTA

SEQ ID NO: 2092 - protein, 16 aa, Artificial Sequence
  source: /note="Description of Artificial Sequence: Synthetic peptide"
  MOD_RES (9)..(9): Citrulline
EVCTNTYAXGTAVEGT

SEQ ID NO: 2093 - protein, 16 aa, Artificial Sequence
  source: /note="Description of Artificial Sequence: Synthetic peptide"
  MOD_RES (5)..(5): Citrulline
  MOD_RES (11)..(11): Citrulline
IASQXLTPLAXGDTLC

SEQ ID NO: 2094 - protein, 16 aa, Artificial Sequence
  source: /note="Description of Artificial Sequence: Synthetic peptide"
  MOD_RES (1)..(1): Citrulline
  MOD_RES (7)..(7): Citrulline
XLTPLAXGDTLCTNLT

SEQ ID NO: 2095 - protein, 16 aa, Artificial Sequence
  source: /note="Description of Artificial Sequence: Synthetic peptide"
  MOD_RES (9)..(9): Citrulline
PLNESEVNXGDKYIAK

SEQ ID NO: 2096 - protein, 16 aa, Artificial Sequence
  source: /note="Description of Artificial Sequence: Synthetic peptide"
  MOD_RES (5)..(5): Citrulline
SEVNXGDKYIAKFQGE

SEQ ID NO: 2097 - protein, 16 aa, Artificial Sequence
  source: /note="Description of Artificial Sequence: Synthetic peptide"
  MOD_RES (7)..(7): Citrulline
  MOD_RES (12)..(12): Citrulline
VPMQDPXAAMQXGSLP

SEQ ID NO: 2098 - protein, 16 aa, Artificial Sequence
  source: /note="Description of Artificial Sequence: Synthetic peptide"
  MOD_RES (3)..(3): Citrulline
  MOD_RES (8)..(8): Citrulline
DPXAAMQXGSLPANVP

SEQ ID NO: 2099 - protein, 16 aa, Artificial Sequence
  source: /note="Description of Artificial Sequence: Synthetic peptide"
  MOD_RES (4)..(4): Citrulline
  MOD_RES (15)..(15): Citrulline
AMQXGSLPANVPTPXG

SEQ ID NO: 2100 - protein, 16 aa, Artificial Sequence
  source: /note="Description of Artificial Sequence: Synthetic peptide"
  MOD_RES (9)..(9): Citrulline
DHGEEFSGXGSFPVAE

SEQ ID NO: 2101 - protein, 16 aa, Artificial Sequence
  source: /note="Description of Artificial Sequence: Synthetic peptide"
  MOD_RES (5)..(5): Citrulline
EFSGXGSFPVAEKVNK

SEQ ID NO: 2102 - protein, 16 aa, Artificial Sequence
  source: /note="Description of Artificial Sequence: Synthetic peptide"
  MOD_RES (5)..(5): Citrulline
  MOD_RES (10)..(10): Citrulline
LSIWXQSSGXGKLPPG

SEQ ID NO: 2103 - protein, 16 aa, Artificial Sequence
  source: /note="Description of Artificial Sequence: Synthetic peptide"
  MOD_RES (2)..(2): Citrulline
  MOD_RES (8)..(8): Citrulline
GXLSQGCXGASTVGAA

SEQ ID NO: 2104 - protein, 16 aa, Artificial Sequence
  source: /note="Description of Artificial Sequence: Synthetic peptide"
  MOD_RES (4)..(4): Citrulline
QGCXGASTVGAAGWKG

SEQ ID NO: 2105 - protein, 16 aa, Artificial Sequence
  source: /note="Description of Artificial Sequence: Synthetic peptide"
  MOD_RES (4)..(4): Citrulline
  MOD_RES (12)..(12): Citrulline
SGVXVEGPLKIXGQVV

SEQ ID NO: 2106 - protein, 16 aa, Artificial Sequence
  source: /note="Description of Artificial Sequence: Synthetic peptide"
  MOD_RES (5)..(5): Citrulline
  MOD_RES (8)..(8): Citrulline
YLQTXGSXFIKFQEMK

SEQ ID NO: 2107 - protein, 16 aa, Artificial Sequence
  source: /note="Description of Artificial Sequence: Synthetic peptide"
  MOD_RES (1)..(1): Citrulline
  MOD_RES (4)..(4): Citrulline
XGSXFIKFQEMKMQEH

SEQ ID NO: 2108 - protein, 16 aa, Artificial Sequence
  source: /note="Description of Artificial Sequence: Synthetic peptide"
  MOD_RES (11)..(11): Citrulline
  MOD_RES (16)..(16): Citrulline
LLVGGVDQSPXGMKIX

SEQ ID NO: 2109 - protein, 16 aa, Artificial Sequence
  source: /note="Description of Artificial Sequence: Synthetic peptide"
  MOD_RES (7)..(7): Citrulline
  MOD_RES (12)..(12): Citrulline
GVDQSPXGMKIXGNIN

SEQ ID NO: 2110 - protein, 16 aa, Artificial Sequence
  source: /note="Description of Artificial Sequence: Synthetic peptide"
  MOD_RES (4)..(4): Citrulline
  MOD_RES (11)..(11): Citrulline
LAPXSQYTTGXGSSGV

SEQ ID NO: 2111 - protein, 16 aa, Artificial Sequence
  source: /note="Description of Artificial Sequence: Synthetic peptide"
  MOD_RES (7)..(7): Citrulline
SQYTTGXGSSGVGLTA

SEQ ID NO: 2112 - protein, 16 aa, Artificial Sequence
  source: /note="Description of Artificial Sequence: Synthetic peptide"
  MOD_RES (2)..(2): Citrulline
  MOD_RES (11)..(11): Citrulline
LXLGTPALTSXGLLEK

SEQ ID NO: 2113 - protein, 16 aa, Artificial Sequence
  source: /note="Description of Artificial Sequence: Synthetic peptide"
  MOD_RES (7)..(7): Citrulline
TPALTSXGLLEKDFQK

SEQ ID NO: 2114 - protein, 16 aa, Artificial Sequence
  source: /note="Description of Artificial Sequence: Synthetic peptide"
  MOD_RES (3)..(3): Citrulline
TSXGLLEKDFQKVAHF

SEQ ID NO: 2115 - protein, 16 aa, Artificial Sequence
  source: /note="Description of Artificial Sequence: Synthetic peptide"
  MOD_RES (6)..(6): Citrulline
ALALPXGLLNDAFQKG

SEQ ID NO: 2116 - protein, 16 aa, Artificial Sequence
  source: /note="Description of Artificial Sequence: Synthetic peptide"
  MOD_RES (10)..(10): Citrulline
CAQSVHEYLXGEPFHE

SEQ ID NO: 2117 - protein, 16 aa, Artificial Sequence
  source: /note="Description of Artificial Sequence: Synthetic peptide"
  MOD_RES (6)..(6): Citrulline
VHEYLXGEPFHEYLDS

SEQ ID NO: 2118 - protein, 16 aa, Artificial Sequence
  source: /note="Description of Artificial Sequence: Synthetic peptide"
  MOD_RES (5)..(5): Citrulline
  MOD_RES (7)..(7): Citrulline
NGMAXGXYLPEVMGDG

SEQ ID NO: 2119 - protein, 16 aa, Artificial Sequence
  source: /note="Description of Artificial Sequence: Synthetic peptide"
  MOD_RES (1)..(1): Citrulline
  MOD_RES (3)..(3): Citrulline
XGXYLPEVMGDGLANQ

SEQ ID NO: 2120 - protein, 16 aa, Artificial Sequence
  source: /note="Description of Artificial Sequence: Synthetic peptide"
  MOD_RES (8)..(8): Citrulline
  MOD_RES (11)..(11): Citrulline
CAWCPQYXFCXGCKID

SEQ ID NO: 2121 - protein, 16 aa, Artificial Sequence
  source: /note="Description of Artificial Sequence: Synthetic peptide"
  MOD_RES (7)..(7): Citrulline
DQMAAAXGILQKNVPI

SEQ ID NO: 2122 - protein, 16 aa, Artificial Sequence
  source: /note="Description of Artificial Sequence: Synthetic peptide"
  MOD_RES (3)..(3): Citrulline
AAXGILQKNVPILYTA

SEQ ID NO: 2123 - protein, 16 aa, Artificial Sequence
  source: /note="Description of Artificial Sequence: Synthetic peptide"
  MOD_RES (11)..(11): Citrulline
MIMMEMTDFTXGKGPL

SEQ ID NO: 2124 - protein, 16 aa, Artificial Sequence
  source: /note="Description of Artificial Sequence: Synthetic peptide"
  MOD_RES (7)..(7): Citrulline
EMTDFTXGKGPLKNTS

SEQ ID NO: 2125 - protein, 16 aa, Artificial Sequence
  source: /note="Description of Artificial Sequence: Synthetic peptide"
  MOD_RES (3)..(3): Citrulline
FTXGKGPLKNTSDVIS

SEQ ID NO: 2126 - protein, 16 aa, Artificial Sequence
  source: /note="Description of Artificial Sequence: Synthetic peptide"
  MOD_RES (13)..(13): Citrulline
  MOD_RES (15)..(15): Citrulline
SLNCLQTPSSTSXGXK

SEQ ID NO: 2127 - protein, 16 aa, Artificial Sequence
  source: /note="Description of Artificial Sequence: Synthetic peptide"
  MOD_RES (9)..(9): Citrulline
  MOD_RES (11)..(11): Citrulline
LQTPSSTSXGXKMTVN

SEQ ID NO: 2128 - protein, 16 aa, Artificial Sequence
  source: /note="Description of Artificial Sequence: Synthetic peptide"
  MOD_RES (5)..(5): Citrulline
  MOD_RES (7)..(7): Citrulline
SSTSXGXKMTVNGAPV

SEQ ID NO: 2129 - protein, 16 aa, Artificial Sequence
  source: /note="Description of Artificial Sequence: Synthetic peptide"
  MOD_RES (1)..(1): Citrulline
  MOD_RES (3)..(3): Citrulline
XGXKMTVNGAPVPPLT

SEQ ID NO: 2130 - protein, 16 aa, Artificial Sequence
  source: /note="Description of Artificial Sequence: Synthetic peptide"
  MOD_RES (7)..(7): Citrulline
  MOD_RES (10)..(10): Citrulline
TPKSLTXGPXDKPTPP

SEQ ID NO: 2131 - protein, 16 aa, Artificial Sequence
  source: /note="Description of Artificial Sequence: Synthetic peptide"
  MOD_RES (11)..(11): Citrulline
FKAACETFDVXGKQHI

SEQ ID NO: 2132 - protein, 16 aa, Artificial Sequence
  source: /note="Description of Artificial Sequence: Synthetic peptide"
  MOD_RES (7)..(7): Citrulline
CETFDVXGKQHIQIPK

SEQ ID NO: 2133 - protein, 16 aa, Artificial Sequence
  source: /note="Description of Artificial Sequence: Synthetic peptide"
  MOD_RES (4)..(4): Citrulline
  MOD_RES (14)..(14): Citrulline
WQQXLHDSQHKGVXGG

SEQ ID NO: 2134 - protein, 16 aa, Artificial Sequence
  source: /note="Description of Artificial Sequence: Synthetic peptide"
  MOD_RES (10)..(10): Citrulline
  MOD_RES (13)..(13): Citrulline
LHDSQHKGVXGGXMTL

SEQ ID NO: 2135 - protein, 16 aa, Artificial Sequence
  source: /note="Description of Artificial Sequence: Synthetic peptide"
  MOD_RES (13)..(13): Citrulline
GVCEWKFFSSMPXGSA

SEQ ID NO: 2136 - protein, 16 aa, Artificial Sequence
  source: /note="Description of Artificial Sequence: Synthetic peptide"
  MOD_RES (9)..(9): Citrulline
  MOD_RES (13)..(13): Citrulline
WKFFSSMPXGSAXITV

SEQ ID NO: 2137 - protein, 16 aa, Artificial Sequence
  source: /note="Description of Artificial Sequence: Synthetic peptide"
  MOD_RES (5)..(5): Citrulline
  MOD_RES (9)..(9): Citrulline
SSMPXGSAXITVSKDQ

SEQ ID NO: 2138 - protein, 16 aa, Artificial Sequence
  source: /note="Description of Artificial Sequence: Synthetic peptide"
  MOD_RES (13)..(13): Citrulline
LPSASPSPGYLGXGAP

SEQ ID NO: 2139 - protein, 16 aa, Artificial Sequence
  source: /note="Description of Artificial Sequence: Synthetic peptide"
  MOD_RES (9)..(9): Citrulline
SPSPGYLGXGAPPPVE

SEQ ID NO: 2140 - protein, 16 aa, Artificial Sequence
  source: /note="Description of Artificial Sequence: Synthetic peptide"
  MOD_RES (13)..(13): Citrulline
FLTAQLKQDGKSXGTL

SEQ ID NO: 2141 - protein, 16 aa, Artificial Sequence
  source: /note="Description of Artificial Sequence: Synthetic peptide"
  MOD_RES (9)..(9): Citrulline
QLKQDGKSXGTLLALE

SEQ ID NO: 2142 - protein, 16 aa, Artificial Sequence
  source: /note="Description of Artificial Sequence: Synthetic peptide"
  MOD_RES (5)..(5): Citrulline
DGKSXGTLLALEGPGL

SEQ ID NO: 2143 - protein, 16 aa, Artificial Sequence
  source: /note="Description of Artificial Sequence: Synthetic peptide"
  MOD_RES (10)..(10): Citrulline
AALPPISYPXGALPWA

SEQ ID NO: 2144 - protein, 16 aa, Artificial Sequence
  source: /note="Description of Artificial Sequence: Synthetic peptide"
  MOD_RES (6)..(6): Citrulline
PISYPXGALPWAATPA

SEQ ID NO: 2145 - protein, 16 aa, Artificial Sequence
  source: /note="Description of Artificial Sequence: Synthetic peptide"
  MOD_RES (2)..(2): Citrulline
PXGALPWAATPASCAP

SEQ ID NO: 2146 - protein, 16 aa, Artificial Sequence
  source: /note="Description of Artificial Sequence: Synthetic peptide"
  MOD_RES (10)..(10): Citrulline
  MOD_RES (15)..(15): Citrulline
SLKLGPLQPXGVPLXE

SEQ ID NO: 2147 - protein, 16 aa, Artificial Sequence
  source: /note="Description of Artificial Sequence: Synthetic peptide"
  MOD_RES (6)..(6): Citrulline
  MOD_RES (11)..(11): Citrulline
GPLQPXGVPLXEKKAT

SEQ ID NO: 2148 - protein, 16 aa, Artificial Sequence
  source: /note="Description of Artificial Sequence: Synthetic peptide"
  MOD_RES (8)..(8): Citrulline
  MOD_RES (13)..(13): Citrulline
LLELVTTXGSTGXGLS

SEQ ID NO: 2149 - protein, 16 aa, Artificial Sequence
  source: /note="Description of Artificial Sequence: Synthetic peptide"
  MOD_RES (4)..(4): Citrulline
  MOD_RES (9)..(9): Citrulline
VTTXGSTGXGLSYNFT

SEQ ID NO: 2150 - protein, 16 aa, Artificial Sequence
  source: /note="Description of Artificial Sequence: Synthetic peptide"
  MOD_RES (6)..(6): Citrulline
  MOD_RES (8)..(8): Citrulline
SLFSFXGXAKDVGSEN

SEQ ID NO: 2151 - protein, 16 aa, Artificial Sequence
  source: /note="Description of Artificial Sequence: Synthetic peptide"
  MOD_RES (2)..(2): Citrulline
  MOD_RES (4)..(4): Citrulline
FXGXAKDVGSENDFAD

SEQ ID NO: 2152 - protein, 16 aa, Artificial Sequence
  source: /note="Description of Artificial Sequence: Synthetic peptide"
  MOD_RES (6)..(6): Citrulline
  MOD_RES (15)..(15): Citrulline
IGLGGXGGSGGSYGXG

SEQ ID NO: 2153 - protein, 16 aa, Artificial Sequence
  source: /note="Description of Artificial Sequence: Synthetic peptide"
  MOD_RES (7)..(7): Citrulline
  MOD_RES (10)..(10): Citrulline
SGGSYGXGSXGGSGGS

SEQ ID NO: 2154 - protein, 16 aa, Artificial Sequence
  source: /note="Description of Artificial Sequence: Synthetic peptide"
  MOD_RES (3)..(3): Citrulline
  MOD_RES (6)..(6): Citrulline
YGXGSXGGSGGSYGGG

SEQ ID NO: 2155 - protein, 16 aa, Artificial Sequence
  source: /note="Description of Artificial Sequence: Synthetic peptide"
  MOD_RES (2)..(2): Citrulline
SXGGSGGSYGGGGSGG

SEQ ID NO: 2156 - protein, 16 aa, Artificial Sequence
  source: /note="Description of Artificial Sequence: Synthetic peptide"
  MOD_RES (13)..(13): Citrulline
GSGGGYGGGSGSXGGS

SEQ ID NO: 2157 - protein, 16 aa, Artificial Sequence
  source: /note="Description of Artificial Sequence: Synthetic peptide"
  MOD_RES (9)..(9): Citrulline
GYGGGSGSXGGSGGSY

SEQ ID NO: 2158 - protein, 16 aa, Artificial Sequence
  source: /note="Description of Artificial Sequence: Synthetic peptide"
  MOD_RES (5)..(5): Citrulline
GSGSXGGSGGSYGGGS

SEQ ID NO: 2159 - protein, 16 aa, Artificial Sequence
  source: /note="Description of Artificial Sequence: Synthetic peptide"
  MOD_RES (1)..(1): Citrulline
XGGSGGSYGGGSGSGG

SEQ ID NO: 2160 - protein, 16 aa, Artificial Sequence
  source: /note="Description of Artificial Sequence: Synthetic peptide"
  MOD_RES (11)..(11): Citrulline
GGGYGGGSGSXGGSGG

SEQ ID NO: 2161 - protein, 16 aa, Artificial Sequence
  source: /note="Description of Artificial Sequence: Synthetic peptide"
  MOD_RES (7)..(7): Citrulline
GGGSGSXGGSGGSHGG

SEQ ID NO: 2162 - protein, 16 aa, Artificial Sequence
  source: /note="Description of Artificial Sequence: Synthetic peptide"
  MOD_RES (4)..(4): Citrulline
  MOD_RES (9)..(9): Citrulline
NSNXYLYAXGNYDAAQ

SEQ ID NO: 2163 - protein, 16 aa, Artificial Sequence
  source: /note="Description of Artificial Sequence: Synthetic peptide"
  MOD_RES (5)..(5): Citrulline
  MOD_RES (13)..(13): Citrulline
YLYAXGNYDAAQXGPG

SEQ ID NO: 2164 - protein, 16 aa, Artificial Sequence
  source: /note="Description of Artificial Sequence: Synthetic peptide"
  MOD_RES (14)..(14): Citrulline
FPGVCKNGLCVNTXGS

SEQ ID NO: 2165 - protein, 16 aa, Artificial Sequence
  source: /note="Description of Artificial Sequence: Synthetic peptide"
  MOD_RES (10)..(10): Citrulline
CKNGLCVNTXGSFKCQ

SEQ ID NO: 2166 - protein, 16 aa, Artificial Sequence
  source: /note="Description of Artificial Sequence: Synthetic peptide"
  MOD_RES (6)..(6): Citrulline
LCVNTXGSFKCQCPSG

SEQ ID NO: 2167 - protein, 16 aa, Artificial Sequence
  source: /note="Description of Artificial Sequence: Synthetic peptide"
  MOD_RES (6)..(6): Citrulline
  MOD_RES (11)..(11): Citrulline
ICENGXCLNTXGSYTC

SEQ ID NO: 2168 - protein, 16 aa, Artificial Sequence
  source: /note="Description of Artificial Sequence: Synthetic peptide"
  MOD_RES (2)..(2): Citrulline
  MOD_RES (7)..(7): Citrulline
GXCLNTXGSYTCECND

SEQ ID NO: 2169 - protein, 16 aa, Artificial Sequence
  source: /note="Description of Artificial Sequence: Synthetic peptide"
  MOD_RES (10)..(10): Citrulline
TKEYETLCPXGAGFAN

SEQ ID NO: 2170 - protein, 16 aa, Artificial Sequence
  source: /note="Description of Artificial Sequence: Synthetic peptide"
  MOD_RES (6)..(6): Citrulline
  MOD_RES (13)..(13): Citrulline
ETLCPXGAGFANXGDV

SEQ ID NO: 2171 - protein, 16 aa, Artificial Sequence
  source: /note="Description of Artificial Sequence: Synthetic peptide"
  MOD_RES (5)..(5): Citrulline
  MOD_RES (12)..(12): Citrulline
GFANXGDVLTGXPFYK

SEQ ID NO: 2172 - protein, 16 aa, Artificial Sequence
  source: /note="Description of Artificial Sequence: Synthetic peptide"
  MOD_RES (1)..(1): Citrulline
  MOD_RES (8)..(8): Citrulline
XGDVLTGXPFYKDINE

SEQ ID NO: 2173 - protein, 16 aa, Artificial Sequence
  source: /note="Description of Artificial Sequence: Synthetic peptide"
  MOD_RES (11)..(11): Citrulline
TEGSYQCSCPXGYVLQ

SEQ ID NO: 2174 - protein, 16 aa, Artificial Sequence
  source: /note="Description of Artificial Sequence: Synthetic peptide"
  MOD_RES (7)..(7): Citrulline
YQCSCPXGYVLQEDGK

SEQ ID NO: 2175 - protein, 16 aa, Artificial Sequence
  source: /note="Description of Artificial Sequence: Synthetic peptide"
  MOD_RES (3)..(3): Citrulline
CPXGYVLQEDGKTCKD

SEQ ID NO: 2176 - protein, 16 aa, Artificial Sequence
  source: /note="Description of Artificial Sequence: Synthetic peptide"
  MOD_RES (7)..(7): Citrulline
  MOD_RES (11)..(11): Citrulline
NIIEMYXGKKXHEMPP

SEQ ID NO: 2177 - protein, 16 aa, Artificial Sequence
  source: /note="Description of Artificial Sequence: Synthetic peptide"
  MOD_RES (10)..(10): Citrulline
  MOD_RES (16)..(16): Citrulline
AAAGNPFPVXGSIELX

SEQ ID NO: 2178 - protein, 16 aa, Artificial Sequence
  source: /note="Description of Artificial Sequence: Synthetic peptide"
  MOD_RES (6)..(6): Citrulline
  MOD_RES (12)..(12): Citrulline
NPFPVXGSIELXKPDG

SEQ ID NO: 2179 - protein, 16 aa, Artificial Sequence
  source: /note="Description of Artificial Sequence: Synthetic peptide"
  MOD_RES (3)..(3): Citrulline
  MOD_RES (11)..(11): Citrulline
GGXGGMGGSDXGGFNK

SEQ ID NO: 2180 - protein, 16 aa, Artificial Sequence
  source: /note="Description of Artificial Sequence: Synthetic peptide"
  MOD_RES (7)..(7): Citrulline
GMGGSDXGGFNKFGGP

SEQ ID NO: 2181 - protein, 15 aa, Artificial Sequence
  source: /note="Description of Artificial Sequence: Synthetic peptide"
  MOD_RES (11)..(11): Citrulline
YGGGGSGGGGXGGFP

SEQ ID NO: 2182 - protein, 15 aa, Artificial Sequence
  source: /note="Description of Artificial Sequence: Synthetic peptide"
  MOD_RES (7)..(7): Citrulline
GSGGGGXGGFPSGGG

SEQ ID NO: 2183 - protein, 14 aa, Artificial Sequence
  source: /note="Description of Artificial Sequence: Synthetic peptide"
  MOD_RES (3)..(3): Citrulline
GGXGGFPSGGGGGG

SEQ ID NO: 2184 - protein, 16 aa, Artificial Sequence
  source: /note="Description of Artificial Sequence: Synthetic peptide"
  MOD_RES (11)..(11): Citrulline
FALTFPKPLQXGTNDK

SEQ ID NO: 2185 - protein, 16 aa, Artificial Sequence
  source: /note="Description of Artificial Sequence: Synthetic peptide"
  MOD_RES (7)..(7): Citrulline
  MOD_RES (14)..(14): Citrulline
FPKPLQXGTNDKSXPL

SEQ ID NO: 2186 - protein, 16 aa, Artificial Sequence
  source: /note="Description of Artificial Sequence: Synthetic peptide"
  MOD_RES (11)..(11): Citrulline
EEQVPMELVQXGDIVK

SEQ ID NO: 2187 - protein, 16 aa, Artificial Sequence
  source: /note="Description of Artificial Sequence: Synthetic peptide"
  MOD_RES (7)..(7): Citrulline
PMELVQXGDIVKVVPG

SEQ ID NO: 2188 - protein, 16 aa, Artificial Sequence
  source: /note="Description of Artificial Sequence: Synthetic peptide"
  MOD_RES (3)..(3): Citrulline
VQXGDIVKVVPGGKFP

SEQ ID NO: 2189 - protein, 16 aa, Artificial Sequence
  source: /note="Description of Artificial Sequence: Synthetic peptide"
  MOD_RES (12)..(12): Citrulline
ASKAAFGGSGGXGSSS

SEQ ID NO: 2190 - protein, 16 aa, Artificial Sequence
  source: /note="Description of Artificial Sequence: Synthetic peptide"
  MOD_RES (8)..(8): Citrulline
AFGGSGGXGSSSGGGY

SEQ ID NO: 2191 - protein, 16 aa, Artificial Sequence
  source: /note="Description of Artificial Sequence: Synthetic peptide"
  MOD_RES (4)..(4): Citrulline
SGGXGSSSGGGYSSGS

SEQ ID NO: 2192 - protein, 15 aa, Artificial Sequence
  source: /note="Description of Artificial Sequence: Synthetic peptide"
  MOD_RES (7)..(7): Citrulline
SSGGGSXGGSSSGGG

SEQ ID NO: 2193 - protein, 16 aa, Artificial Sequence
  source: /note="Description of Artificial Sequence: Synthetic peptide"
  MOD_RES (3)..(3): Citrulline
GSXGGSSSGGGYGSGG

SEQ ID NO: 2194 - protein, 16 aa, Artificial Sequence
  source: /note="Description of Artificial Sequence: Synthetic peptide"
  MOD_RES (1)..(1): Citrulline
  MOD_RES (10)..(10): Citrulline
XLKLGKPLGXGAFGQV

SEQ ID NO: 2195 - protein, 16 aa, Artificial Sequence
  source: /note="Description of Artificial Sequence: Synthetic peptide"
  MOD_RES (6)..(6): Citrulline
GKPLGXGAFGQVIEAD

SEQ ID NO: 2196 - protein, 16 aa, Artificial Sequence
  source: /note="Description of Artificial Sequence: Synthetic peptide"
  MOD_RES (8)..(8): Citrulline
QLDGFDPXGNIKVLMA

SEQ ID NO: 2197 - protein, 16 aa, Artificial Sequence
  source: /note="Description of Artificial Sequence: Synthetic peptide"
  MOD_RES (10)..(10): Citrulline
  MOD_RES (14)..(14): Citrulline
PEPTPTVETXGTAXGF

SEQ ID NO: 2198 - protein, 16 aa, Artificial Sequence
  source: /note="Description of Artificial Sequence: Synthetic peptide"
  MOD_RES (6)..(6): Citrulline
  MOD_RES (10)..(10): Citrulline
PTVETXGTAXGFQPPE

SEQ ID NO: 2199 - protein, 16 aa, Artificial Sequence
  source: /note="Description of Artificial Sequence: Synthetic peptide"
  MOD_RES (8)..(8): Citrulline
QQMMPEVXGALFGANA

SEQ ID NO: 2200 - protein, 16 aa, Artificial Sequence
  source: /note="Description of Artificial Sequence: Synthetic peptide"
  MOD_RES (4)..(4): Citrulline
  MOD_RES (14)..(14): Citrulline
PEVXGALFGANANXKF

SEQ ID NO: 2201 - protein, 16 aa, Artificial Sequence
  source: /note="Description of Artificial Sequence: Synthetic peptide"
  MOD_RES (4)..(4): Citrulline
  MOD_RES (13)..(13): Citrulline
EQSXGLGHGSTSXGGP

SEQ ID NO: 2202 - protein, 16 aa, Artificial Sequence
  source: /note="Description of Artificial Sequence: Synthetic peptide"
  MOD_RES (9)..(9): Citrulline
GLGHGSTSXGGPWVGT

SEQ ID NO: 2203 - protein, 16 aa, Artificial Sequence
  source: /note="Description of Artificial Sequence: Synthetic peptide"
  MOD_RES (5)..(5): Citrulline
LLYDXGTKFGLFTPGS

SEQ ID NO: 2204 - protein, 16 aa, Artificial Sequence
  source: /note="Description of Artificial Sequence: Synthetic peptide"
  MOD_RES (9)..(9): Citrulline
  MOD_RES (12)..(12): Citrulline
QGAFGNMCXGGXMFAP

SEQ ID NO: 2205 - protein, 16 aa, Artificial Sequence
  source: /note="Description of Artificial Sequence: Synthetic peptide"
  MOD_RES (5)..(5): Citrulline
  MOD_RES (8)..(8): Citrulline
GNMCXGGXMFAPTKTW

SEQ ID NO: 2206 - protein, 16 aa, Artificial Sequence
  source: /note="Description of Artificial Sequence: Synthetic peptide"
  MOD_RES (9)..(9): Citrulline
  MOD_RES (13)..(13): Citrulline
PYFQQTGVXGFAXSMP

SEQ ID NO: 2207 - protein, 16 aa, Artificial Sequence
  source: /note="Description of Artificial Sequence: Synthetic peptide"
  MOD_RES (5)..(5): Citrulline
  MOD_RES (9)..(9): Citrulline
QTGVXGFAXSMPTSGA

SEQ ID NO: 2208 - protein, 16 aa, Artificial Sequence
  source: /note="Description of Artificial Sequence: Synthetic peptide"
  MOD_RES (9)..(9): Citrulline
  MOD_RES (13)..(13): Citrulline
MSDSNYVVXGNAXLPV

SEQ ID NO: 2209 - protein, 16 aa, Artificial Sequence
  source: /note="Description of Artificial Sequence: Synthetic peptide"
  MOD_RES (5)..(5): Citrulline
  MOD_RES (9)..(9): Citrulline
NYVVXGNAXLPVKWMA

SEQ ID NO: 2210 - protein, 16 aa, Artificial Sequence
  source: /note="Description of Artificial Sequence: Synthetic peptide"
  MOD_RES (9)..(9): Citrulline
  MOD_RES (13)..(13): Citrulline
KAPASAQSXGEKXTAH

SEQ ID NO: 2211 - protein, 16 aa, Artificial Sequence
  source: /note="Description of Artificial Sequence: Synthetic peptide"
  MOD_RES (5)..(5): Citrulline
  MOD_RES (9)..(9): Citrulline
SAQSXGEKXTAHNAIE

SEQ ID NO: 2212 - protein, 16 aa, Artificial Sequence
  source: /note="Description of Artificial Sequence: Synthetic peptide"
  MOD_RES (14)..(14): Citrulline
GSPFQSSPLSLGSXGS

SEQ ID NO: 2213 - protein, 16 aa, Artificial Sequence
  source: /note="Description of Artificial Sequence: Synthetic peptide"
  MOD_RES (10)..(10): Citrulline
QSSPLSLGSXGSGSGG

SEQ ID NO: 2214 - protein, 16 aa, Artificial Sequence
  source: /note="Description of Artificial Sequence: Synthetic peptide"
  MOD_RES (11)..(11): Citrulline
DGKLSLEEFIXGAKSD

SEQ ID NO: 2215 - protein, 16 aa, Artificial Sequence
  source: /note="Description of Artificial Sequence: Synthetic peptide"
  MOD_RES (7)..(7): Citrulline
SLEEFIXGAKSDPSIV

SEQ ID NO: 2216 - protein, 16 aa, Artificial Sequence
  source: /note="Description of Artificial Sequence: Synthetic peptide"
  MOD_RES (9)..(9): Citrulline
VAIDATGPXGAWTNNY

SEQ ID NO: 2217 - protein, 16 aa, Artificial Sequence
  source: /note="Description of Artificial Sequence: Synthetic peptide"
  MOD_RES (1)..(1): Citrulline
  MOD_RES (13)..(13): Citrulline
XGAWTNNYSHSKXGGE

SEQ ID NO: 2218 - protein, 16 aa, Artificial Sequence
  source: /note="Description of Artificial Sequence: Synthetic peptide"
  MOD_RES (8)..(8): Citrulline
  MOD_RES (14)..(14): Citrulline
YESYGNSXSAPPTXGP

SEQ ID NO: 2219 - protein, 16 aa, Artificial Sequence
  source: /note="Description of Artificial Sequence: Synthetic peptide"
  MOD_RES (4)..(4): Citrulline
  MOD_RES (10)..(10): Citrulline
GNSXSAPPTXGPPPSY

SEQ ID NO: 2220 - protein, 15 aa, Artificial Sequence
  source: /note="Description of Artificial Sequence: Synthetic peptide"
  MOD_RES (6)..(6): Citrulline
SAPPTXGPPPSYGGS

SEQ ID NO: 2221 - protein, 16 aa, Artificial Sequence
  source: /note="Description of Artificial Sequence: Synthetic peptide"
  MOD_RES (7)..(8): Citrulline
HLAQGYXXGAKKLESS

SEQ ID NO: 2222 - protein, 16 aa, Artificial Sequence
  source: /note="Description of Artificial Sequence: Synthetic peptide"
  MOD_RES (3)..(4): Citrulline
GYXXGAKKLESSEENL

SEQ ID NO: 2223 - protein, 16 aa, Artificial Sequence
  source: /note="Description of Artificial Sequence: Synthetic peptide"
  MOD_RES (6)..(6): Citrulline
  MOD_RES (8)..(8): Citrulline
GLFAGXGXPGPGLSSQ

SEQ ID NO: 2224 - protein, 16 aa, Artificial Sequence
  source: /note="Description of Artificial Sequence: Synthetic peptide"
  MOD_RES (10)..(10): Citrulline
LEKGGKFTVXGKPTLE

SEQ ID NO: 2225 - protein, 16 aa, Artificial Sequence
  source: /note="Description of Artificial Sequence: Synthetic peptide"
  MOD_RES (6)..(6): Citrulline
GKFTVXGKPTLEDLEQ

SEQ ID NO: 2226 - protein, 16 aa, Artificial Sequence
  source: /note="Description of Artificial Sequence: Synthetic peptide"
  MOD_RES (12)..(12): Citrulline
ISSQTQSIYIPXGVNV

SEQ ID NO: 2227 - protein, 16 aa, Artificial Sequence
  source: /note="Description of Artificial Sequence: Synthetic peptide"
  MOD_RES (8)..(8): Citrulline
TQSIYIPXGVNVSALS

SEQ ID NO: 2228 - protein, 16 aa, Artificial Sequence
  source: /note="Description of Artificial Sequence: Synthetic peptide"
  MOD_RES (7)..(7): Citrulline
  MOD_RES (10)..(10): Citrulline
GDLEALXGPXGFPGPP

SEQ ID NO: 2229 - protein, 16 aa, Artificial Sequence
  source: /note="Description of Artificial Sequence: Synthetic peptide"
  MOD_RES (3)..(3): Citrulline
  MOD_RES (6)..(6): Citrulline
ALXGPXGFPGPPGPPG

SEQ ID NO: 2230 - protein, 16 aa, Artificial Sequence
  source: /note="Description of Artificial Sequence: Synthetic peptide"
  MOD_RES (13)..(13): Citrulline
YGFYGCYCGWGGXGTP

SEQ ID NO: 2231 - protein, 16 aa, Artificial Sequence
  source: /note="Description of Artificial Sequence: Synthetic peptide"
  MOD_RES (9)..(9): Citrulline
GCYCGWGGXGTPKDGT

SEQ ID NO: 2232 - protein, 16 aa, Artificial Sequence
  source: /note="Description of Artificial Sequence: Synthetic peptide"
  MOD_RES (12)..(12): Citrulline
NESDLFMSYFPXGLKY

SEQ ID NO: 2233 - protein, 16 aa, Artificial Sequence
  source: /note="Description of Artificial Sequence: Synthetic peptide"
  MOD_RES (8)..(8): Citrulline
LFMSYFPXGLKYQEGG

SEQ ID NO: 2234 - protein, 16 aa, Artificial Sequence
  source: /note="Description of Artificial Sequence: Synthetic peptide"
  MOD_RES (4)..(4): Citrulline
YFPXGLKYQEGGVESA

SEQ ID NO: 2235 - protein, 16 aa, Artificial Sequence
  source: /note="Description of Artificial Sequence: Synthetic peptide"
  MOD_RES (11)..(11): Citrulline
  MOD_RES (14)..(14): Citrulline
DKDSGDVAALXGSXKF

SEQ ID NO: 2236 - protein, 16 aa, Artificial Sequence
  source: /note="Description of Artificial Sequence: Synthetic peptide"
  MOD_RES (7)..(7): Citrulline
  MOD_RES (10)..(10): Citrulline
GDVAALXGSXKFNILG

SEQ ID NO: 2237 - protein, 16 aa, Artificial Sequence
  source: /note="Description of Artificial Sequence: Synthetic peptide"
  MOD_RES (3)..(3): Citrulline
  MOD_RES (6)..(6): Citrulline
ALXGSXKFNILGTNTK

SEQ ID NO: 2238 - protein, 16 aa, Artificial Sequence
  source: /note="Description of Artificial Sequence: Synthetic peptide"
  MOD_RES (8)..(9): Citrulline
LIGWGQIXXGVTIKPT

SEQ ID NO: 2239 - protein, 16 aa, Artificial Sequence
  source: /note="Description of Artificial Sequence: Synthetic peptide"
  MOD_RES (4)..(5): Citrulline
GQIXXGVTIKPTVDDD

SEQ ID NO: 2240 - protein, 16 aa, Artificial Sequence
  source: /note="Description of Artificial Sequence: Synthetic peptide"
  MOD_RES (11)..(11): Citrulline
SPFAVSPIPGXGGVLN

SEQ ID NO: 2241 - protein, 16 aa, Artificial Sequence
  source: /note="Description of Artificial Sequence: Synthetic peptide"
  MOD_RES (7)..(7): Citrulline
VSPIPGXGGVLNVPIS

SEQ ID NO: 2242 - protein, 16 aa, Artificial Sequence
  source: /note="Description of Artificial Sequence: Synthetic peptide"
  MOD_RES (3)..(3): Citrulline
PGXGGVLNVPISPALS

SEQ ID NO: 2243 - protein, 16 aa, Artificial Sequence
  source: /note="Description of Artificial Sequence: Synthetic peptide"
  MOD_RES (7)..(7): Citrulline
  MOD_RES (9)..(9): Citrulline
LQSLLEXGXQLGVEVP

SEQ ID NO: 2244 - protein, 16 aa, Artificial Sequence
  source: /note="Description of Artificial Sequence: Synthetic peptide"
  MOD_RES (11)..(11): Citrulline
KGSELEITLTXGSSLP

SEQ ID NO: 2245 - protein, 16 aa, Artificial Sequence
  source: /note="Description of Artificial Sequence: Synthetic peptide"
  MOD_RES (7)..(7): Citrulline
LEITLTXGSSLPGPAC

SEQ ID NO: 2246 - protein, 16 aa, Artificial Sequence
  source: /note="Description of Artificial Sequence: Synthetic peptide"
  MOD_RES (3)..(3): Citrulline
LTXGSSLPGPACAYVN

SEQ ID NO: 2247 - protein, 16 aa, Artificial Sequence
  source: /note="Description of Artificial Sequence: Synthetic peptide"
  MOD_RES (10)..(10): Citrulline
  MOD_RES (14)..(14): Citrulline
HSFKVSNYSXGSGXCI

SEQ ID NO: 2248 - protein, 16 aa, Artificial Sequence
  source: /note="Description of Artificial Sequence: Synthetic peptide"
  MOD_RES (11)..(11): Citrulline
  MOD_RES (14)..(14): Citrulline
NGSEGALQFHXGSXAQ

SEQ ID NO: 2249 - protein, 16 aa, Artificial Sequence
  source: /note="Description of Artificial Sequence: Synthetic peptide"
  MOD_RES (7)..(7): Citrulline
  MOD_RES (10)..(10): Citrulline
GALQFHXGSXAQSFLQ

SEQ ID NO: 2250 - protein, 16 aa, Artificial Sequence
  source: /note="Description of Artificial Sequence: Synthetic peptide"
  MOD_RES (7)..(7): Citrulline
PKSTESXGLGAGAGAG

SEQ ID NO: 2251 - protein, 16 aa, Artificial Sequence
  source: /note="Description of Artificial Sequence: Synthetic peptide"
  MOD_RES (3)..(3): Citrulline
ESXGLGAGAGAGGSAG

SEQ ID NO: 2252 - protein, 16 aa, Artificial Sequence
  source: /note="Description of Artificial Sequence: Synthetic peptide"
  MOD_RES (11)..(11): Citrulline
NSIQIGGLFPXGADQE

SEQ ID NO: 2253 - protein, 16 aa, Artificial Sequence
  source: /note="Description of Artificial Sequence: Synthetic peptide"
  MOD_RES (13)..(13): Citrulline
EIASSDSANVSSXGGK

SEQ ID NO: 2254 - protein, 16 aa, Artificial Sequence
  source: /note="Description of Artificial Sequence: Synthetic peptide"
  MOD_RES (9)..(9): Citrulline
SDSANVSSXGGKKFLP

SEQ ID NO: 2255 - protein, 16 aa, Artificial Sequence
  source: /note="Description of Artificial Sequence: Synthetic peptide"
  MOD_RES (5)..(5): Citrulline
NVSSXGGKKFLPVLKE

SEQ ID NO: 2256 - protein, 16 aa, Artificial Sequence
  source: /note="Description of Artificial Sequence: Synthetic peptide"
  MOD_RES (9)..(9): Citrulline
  MOD_RES (12)..(12): Citrulline
YWVEESTAXKGXGALP

SEQ ID NO: 2257 - protein, 16 aa, Artificial Sequence
  source: /note="Description of Artificial Sequence: Synthetic peptide"
  MOD_RES (5)..(5): Citrulline
  MOD_RES (8)..(8): Citrulline
ESTAXKGXGALPVAES

SEQ ID NO: 2258 - protein, 16 aa, Artificial Sequence
  source: /note="Description of Artificial Sequence: Synthetic peptide"
  MOD_RES (7)..(7): Citrulline
PMVFANXGETVSGGNF

SEQ ID NO: 2259 - protein, 16 aa, Artificial Sequence
  source: /note="Description of Artificial Sequence: Synthetic peptide"
  MOD_RES (12)..(12): Citrulline
  MOD_RES (15)..(15): Citrulline
YTNYEVVTMVTXGHXL

SEQ ID NO: 2260 - protein, 16 aa, Artificial Sequence
  source: /note="Description of Artificial Sequence: Synthetic peptide"
  MOD_RES (8)..(8): Citrulline
  MOD_RES (11)..(11): Citrulline
EVVTMVTXGHXLYQPK

SEQ ID NO: 2261 - protein, 16 aa, Artificial Sequence
  source: /note="Description of Artificial Sequence: Synthetic peptide"
  MOD_RES (8)..(8): Citrulline
SLAPGFIXGAQASSGS

SEQ ID NO: 2262 - protein, 16 aa, Artificial Sequence
  source: /note="Description of Artificial Sequence: Synthetic peptide"
  MOD_RES (4)..(4): Citrulline
GFIXGAQASSGSPALP

SEQ ID NO: 2263 - protein, 16 aa, Artificial Sequence
  source: /note="Description of Artificial Sequence: Synthetic peptide"
  MOD_RES (13)..(13): Citrulline
MAYNMNLLQTHGXGSP

SEQ ID NO: 2264 - protein, 16 aa, Artificial Sequence
  source: /note="Description of Artificial Sequence: Synthetic peptide"
  MOD_RES (9)..(9): Citrulline
MNLLQTHGXGSPIPYG

SEQ ID NO: 2265 - protein, 16 aa, Artificial Sequence
  source: /note="Description of Artificial Sequence: Synthetic peptide"
  MOD_RES (11)..(11): Citrulline
APASQPPPQVXGSVMP

SEQ ID NO: 2266 - protein, 16 aa, Artificial Sequence
  source: /note="Description of Artificial Sequence: Synthetic peptide"
  MOD_RES (7)..(7): Citrulline
  MOD_RES (16)..(16): Citrulline
QPPPQVXGSVMPSVIX

SEQ ID NO: 2267 - protein, 16 aa, Artificial Sequence
  source: /note="Description of Artificial Sequence: Synthetic peptide"
  MOD_RES (11)..(11): Citrulline
PAGGLAPGGGXGALLD

SEQ ID NO: 2268 - protein, 16 aa, Artificial Sequence
  source: /note="Description of Artificial Sequence: Synthetic peptide"
  MOD_RES (7)..(7): Citrulline
  MOD_RES (15)..(15): Citrulline
LAPGGGXGALLDQIXQ

SEQ ID NO: 2269 - protein, 16 aa, Artificial Sequence
  source: /note="Description of Artificial Sequence: Synthetic peptide"
  MOD_RES (3)..(3): Citrulline
  MOD_RES (11)..(11): Citrulline
GGXGALLDQIXQGIQL

SEQ ID NO: 2270 - protein, 16 aa, Artificial Sequence
  source: /note="Description of Artificial Sequence: Synthetic peptide"
  MOD_RES (5)..(5): Citrulline
LFVLXGTNKADAGKEL

SEQ ID NO: 2271 - protein, 16 aa, Artificial Sequence
  source: /note="Description of Artificial Sequence: Synthetic peptide"
  MOD_RES (6)..(6): Citrulline
  MOD_RES (12)..(12): Citrulline
MADSCXNLTYVXGSVG

SEQ ID NO: 2272 - protein, 16 aa, Artificial Sequence
  source: /note="Description of Artificial Sequence: Synthetic peptide"
  MOD_RES (2)..(2): Citrulline
  MOD_RES (8)..(8): Citrulline
CXNLTYVXGSVGPATS

SEQ ID NO: 2273 - protein, 16 aa, Artificial Sequence
  source: /note="Description of Artificial Sequence: Synthetic peptide"
  MOD_RES (7)..(7): Citrulline
  MOD_RES (14)..(14): Citrulline
PGPLQEXSLFEKKXGA

SEQ ID NO: 2274 - protein, 16 aa, Artificial Sequence
  source: /note="Description of Artificial Sequence: Synthetic peptide"
  MOD_RES (3)..(3): Citrulline
  MOD_RES (10)..(10): Citrulline
QEXSLFEKKXGAPPSS

SEQ ID NO: 2275 - protein, 16 aa, Artificial Sequence
  source: /note="Description of Artificial Sequence: Synthetic peptide"
  MOD_RES (6)..(6): Citrulline
LFEKKXGAPPSSNIED

SEQ ID NO: 2276 - protein, 16 aa, Artificial Sequence
  source: /note="Description of Artificial Sequence: Synthetic peptide"
  MOD_RES (2)..(2): Citrulline
KXGAPPSSNIEDFHGL

SEQ ID NO: 2277 - protein, 16 aa, Artificial Sequence
  source: /note="Description of Artificial Sequence: Synthetic peptide"
  MOD_RES (9)..(9): Citrulline
AHFIAWTGXGMEFKLI

SEQ ID NO: 2278 - protein, 16 aa, Artificial Sequence
  source: /note="Description of Artificial Sequence: Synthetic peptide"
  MOD_RES (5)..(5): Citrulline
AWTGXGMEFKLIEPEE

SEQ ID NO: 2279 - protein, 16 aa, Artificial Sequence
  source: /note="Description of Artificial Sequence: Synthetic peptide"
  MOD_RES (11)..(11): Citrulline
GSGCALDAVTXGLKTA

SEQ ID NO: 2280 - protein, 16 aa, Artificial Sequence
  source: /note="Description of Artificial Sequence: Synthetic peptide"
  MOD_RES (7)..(7): Citrulline
  MOD_RES (16)..(16): Citrulline
ALDAVTXGLKTALVEX

SEQ ID NO: 2281 - protein, 16 aa, Artificial Sequence
  source: /note="Description of Artificial Sequence: Synthetic peptide"
  MOD_RES (10)..(11): Citrulline
NYLSCDVEVXXGDVLA

SEQ ID NO: 2282 - protein, 16 aa, Artificial Sequence
  source: /note="Description of Artificial Sequence: Synthetic peptide"
  MOD_RES (6)..(7): Citrulline
CDVEVXXGDVLAAWSG

SEQ ID NO: 2283 - protein, 16 aa, Artificial Sequence
  source: /note="Description of Artificial Sequence: Synthetic peptide"
  MOD_RES (2)..(2): Citrulline
  MOD_RES (6)..(6): Citrulline
FXGGPXGLLAVAQDLT

SEQ ID NO: 2284 - protein, 16 aa, Artificial Sequence
  source: /note="Description of Artificial Sequence: Synthetic peptide"
  MOD_RES (2)..(2): Citrulline
PXGLLAVAQDLTEDEE

SEQ ID NO: 2285 - protein, 16 aa, Artificial Sequence
  source: /note="Description of Artificial Sequence: Synthetic peptide"
  MOD_RES (8)..(8): Citrulline
KLHDFGYXGVSSQETA

SEQ ID NO: 2286 - protein, 16 aa, Artificial Sequence
  source: /note="Description of Artificial Sequence: Synthetic peptide"
  MOD_RES (12)..(12): Citrulline
ELYKQIGIDPPXGVLM

SEQ ID NO: 2287 - protein, 16 aa, Artificial Sequence
  source: /note="Description of Artificial Sequence: Synthetic peptide"
  MOD_RES (8)..(8): Citrulline
QIGIDPPXGVLMYGPP

SEQ ID NO: 2288 - protein, 16 aa, Artificial Sequence
  source: /note="Description of Artificial Sequence: Synthetic peptide"
  MOD_RES (11)..(11): Citrulline
TKPENLSSKTXGSIPT

SEQ ID NO: 2289 - protein, 16 aa, Artificial Sequence
  source: /note="Description of Artificial Sequence: Synthetic peptide"
  MOD_RES (7)..(7): Citrulline
NLSSKTXGSIPTDVEV

SEQ ID NO: 2290 - protein, 16 aa, Artificial Sequence
  source: /note="Description of Artificial Sequence: Synthetic peptide"
  MOD_RES (3)..(3): Citrulline
KTXGSIPTDVEVLPTE

SEQ ID NO: 2291 - protein, 16 aa, Artificial Sequence
  source: /note="Description of Artificial Sequence: Synthetic peptide"
  MOD_RES (11)..(11): Citrulline
NTEIVECILKXGQKAT

SEQ ID NO: 2292 - protein, 16 aa, Artificial Sequence
  source: /note="Description of Artificial Sequence: Synthetic peptide"
  MOD_RES (7)..(7): Citrulline
VECILKXGQKATLLQQ

SEQ ID NO: 2293 - protein, 16 aa, Artificial Sequence
  source: /note="Description of Artificial Sequence: Synthetic peptide"
  MOD_RES (14)..(14): Citrulline
LEDLAGFKELFQTXGH

SEQ ID NO: 2294 - protein, 16 aa, Artificial Sequence
  source: /note="Description of Artificial Sequence: Synthetic peptide"
  MOD_RES (10)..(10): Citrulline
AGFKELFQTXGHTEES

SEQ ID NO: 2295 - protein, 16 aa, Artificial Sequence
  source: /note="Description of Artificial Sequence: Synthetic peptide"
  MOD_RES (6)..(6): Citrulline
ELFQTXGHTEESMTND

SEQ ID NO: 2296 - protein, 16 aa, Artificial Sequence
  source: /note="Description of Artificial Sequence: Synthetic peptide"
  MOD_RES (10)..(10): Citrulline
TSLPPLPFKXGGGKDG

SEQ ID NO: 2297 - protein, 16 aa, Artificial Sequence
  source: /note="Description of Artificial Sequence: Synthetic peptide"
  MOD_RES (6)..(6): Citrulline
PLPFKXGGGKDGSVTG

SEQ ID NO: 2298 - protein, 16 aa, Artificial Sequence
  source: /note="Description of Artificial Sequence: Synthetic peptide"
  MOD_RES (10)..(10): Citrulline
LEQNVVKLMXGLLQCM

SEQ ID NO: 2299 - protein, 16 aa, Artificial Sequence
  source: /note="Description of Artificial Sequence: Synthetic peptide"
  MOD_RES (6)..(6): Citrulline
  MOD_RES (14)..(14): Citrulline
VVKLMXGLLQCMMXQV

SEQ ID NO: 2300 - protein, 16 aa, Artificial Sequence
  source: /note="Description of Artificial Sequence: Synthetic peptide"
  MOD_RES (5)..(5): Citrulline
  MOD_RES (7)..(7): Citrulline
IHTAXMXGHQLLSADV

SEQ ID NO: 2301 - protein, 16 aa, Artificial Sequence
  source: /note="Description of Artificial Sequence: Synthetic peptide"
  MOD_RES (9)..(9): Citrulline
KAESLQVTXGDFLASL

SEQ ID NO: 2302 - protein, 16 aa, Artificial Sequence
  source: /note="Description of Artificial Sequence: Synthetic peptide"
  MOD_RES (5)..(5): Citrulline
LQVTXGDFLASLENDI

SEQ ID NO: 2303 - protein, 16 aa, Artificial Sequence
  source: /note="Description of Artificial Sequence: Synthetic peptide"
  MOD_RES (1)..(1): Citrulline
XGDFLASLENDIKPAF

SEQ ID NO: 2304 - protein, 16 aa, Artificial Sequence
  source: /note="Description of Artificial Sequence: Synthetic peptide"
  MOD_RES (11)..(11): Citrulline
GMVPNQYNPLXGSVAP

SEQ ID NO: 2305 - protein, 16 aa, Artificial Sequence
  source: /note="Description of Artificial Sequence: Synthetic peptide"
  MOD_RES (7)..(7): Citrulline
NQYNPLXGSVAPGPLS

SEQ ID NO: 2306 - protein, 16 aa, Artificial Sequence
  source: /note="Description of Artificial Sequence: Synthetic peptide"
  MOD_RES (6)..(6): Citrulline
  MOD_RES (13)..(13): Citrulline
LKVETXGGKAFYXNTE

SEQ ID NO: 2307 - protein, 16 aa, Artificial Sequence
  source: /note="Description of Artificial Sequence: Synthetic peptide"
  MOD_RES (12)..(13): Citrulline
SQPASSSNHSSXXGSL

SEQ ID NO: 2308 - protein, 16 aa, Artificial Sequence
  source: /note="Description of Artificial Sequence: Synthetic peptide"
  MOD_RES (8)..(9): Citrulline
SSSNHSSXXGSLQAYT

SEQ ID NO: 2309 - protein, 16 aa, Artificial Sequence
  source: /note="Description of Artificial Sequence: Synthetic peptide"
  MOD_RES (4)..(5): Citrulline
HSSXXGSLQAYTFEEQ

SEQ ID NO: 2310 - protein, 16 aa, Artificial Sequence
  source: /note="Description of Artificial Sequence: Synthetic peptide"
  MOD_RES (10)..(11): Citrulline
YEQLKDQHLXXGLPVG

SEQ ID NO: 2311 - protein, 16 aa, Artificial Sequence
  source: /note="Description of Artificial Sequence: Synthetic peptide"
  MOD_RES (6)..(7): Citrulline
KDQHLXXGLPVGSPPE

SEQ ID NO: 2312 - protein, 16 aa, Artificial Sequence
  source: /note="Description of Artificial Sequence: Synthetic peptide"
  MOD_RES (8)..(8): Citrulline
LQDFKGFXGGLDVTHG

SEQ ID NO: 2313 - protein, 16 aa, Artificial Sequence
  source: /note="Description of Artificial Sequence: Synthetic peptide"
  MOD_RES (4)..(4): Citrulline
KGFXGGLDVTHGQTGT

SEQ ID NO: 2314 - protein, 16 aa, Artificial Sequence
  source: /note="Description of Artificial Sequence: Synthetic peptide"
  MOD_RES (9)..(9): Citrulline
GLAYVCHQXGEELKGH

SEQ ID NO: 2315 - protein, 16 aa, Artificial Sequence
  source: /note="Description of Artificial Sequence: Synthetic peptide"
  MOD_RES (5)..(5): Citrulline
VCHQXGEELKGHNTLP

SEQ ID NO: 2316 - protein, 16 aa, Artificial Sequence
  source: /note="Description of Artificial Sequence: Synthetic peptide"
  MOD_RES (1)..(1): Citrulline
  MOD_RES (16)..(16): Citrulline
XGEELKGHNTLPSPWX

SEQ ID NO: 2317 - protein, 16 aa, Artificial Sequence
  source: /note="Description of Artificial Sequence: Synthetic peptide"
  MOD_RES (1)..(1): Citrulline
  MOD_RES (10)..(10): Citrulline
XVYATYQVTXGLASLN

SEQ ID NO: 2318 - protein, 16 aa, Artificial Sequence
  source: /note="Description of Artificial Sequence: Synthetic peptide"
  MOD_RES (6)..(6): Citrulline
TYQVTXGLASLNSCVD

SEQ ID NO: 2319 - protein, 16 aa, Artificial Sequence
  source: /note="Description of Artificial Sequence: Synthetic peptide"
  MOD_RES (10)..(10): Citrulline
PLWDANPTPXGTLSAP

SEQ ID NO: 2320 - protein, 16 aa, Artificial Sequence
  source: /note="Description of Artificial Sequence: Synthetic peptide"
  MOD_RES (6)..(6): Citrulline
ANPTPXGTLSAPNATT

SEQ ID NO: 2321 - protein, 16 aa, Artificial Sequence
  source: /note="Description of Artificial Sequence: Synthetic peptide"
  MOD_RES (1)..(1): Citrulline
  MOD_RES (12)..(12): Citrulline
XPSPSTLAATTXGLPS

SEQ ID NO: 2322 - protein, 16 aa, Artificial Sequence
  source: /note="Description of Artificial Sequence: Synthetic peptide"
  MOD_RES (8)..(8): Citrulline
  MOD_RES (13)..(13): Citrulline
STLAATTXGLPSXVSS

SEQ ID NO: 2323 - protein, 16 aa, Artificial Sequence
  source: /note="Description of Artificial Sequence: Synthetic peptide"
  MOD_RES (4)..(4): Citrulline
  MOD_RES (9)..(9): Citrulline
ATTXGLPSXVSSINTI

SEQ ID NO: 2324 - protein, 16 aa, Artificial Sequence
  source: /note="Description of Artificial Sequence: Synthetic peptide"
  MOD_RES (11)..(11): Citrulline
HYSPEGSLHTXGPSTY

SEQ ID NO: 2325 - protein, 16 aa, Artificial Sequence
  source: /note="Description of Artificial Sequence: Synthetic peptide"
  MOD_RES (7)..(7): Citrulline
EGSLHTXGPSTYKIPA

SEQ ID NO: 2326 - protein, 16 aa, Artificial Sequence
  source: /note="Description of Artificial Sequence: Synthetic peptide"
  MOD_RES (12)..(12): Citrulline
PGGNYPTWPYKXGATC

SEQ ID NO: 2327 - protein, 16 aa, Artificial Sequence
  source: /note="Description of Artificial Sequence: Synthetic peptide"
  MOD_RES (5)..(5): Citrulline
  MOD_RES (13)..(13): Citrulline
DLKMXGKLGVSPXMVT

SEQ ID NO: 2328 - protein, 16 aa, Artificial Sequence
  source: /note="Description of Artificial Sequence: Synthetic peptide"
  MOD_RES (8)..(8): Citrulline
  MOD_RES (14)..(14): Citrulline
FLEQCPIXGLYKEXMT

SEQ ID NO: 2329 - protein, 16 aa, Artificial Sequence
  source: /note="Description of Artificial Sequence: Synthetic peptide"
  MOD_RES (4)..(4): Citrulline
  MOD_RES (10)..(10): Citrulline
CPIXGLYKEXMTELYD

SEQ ID NO: 2330 - protein, 16 aa, Artificial Sequence
  source: /note="Description of Artificial Sequence: Synthetic peptide"
  MOD_RES (13)..(13): Citrulline
  MOD_RES (16)..(16): Citrulline
SILPGSSYEVQVXGKX

SEQ ID NO: 2331 - protein, 16 aa, Artificial Sequence
  source: /note="Description of Artificial Sequence: Synthetic peptide"
  MOD_RES (9)..(9): Citrulline
  MOD_RES (12)..(12): Citrulline
GSSYEVQVXGKXLDGP

SEQ ID NO: 2332 - protein, 16 aa, Artificial Sequence
  source: /note="Description of Artificial Sequence: Synthetic peptide"
  MOD_RES (5)..(5): Citrulline
  MOD_RES (8)..(8): Citrulline
EVQVXGKXLDGPGIWS

SEQ ID NO: 2333 - protein, 16 aa, Artificial Sequence
  source: /note="Description of Artificial Sequence: Synthetic peptide"
  MOD_RES (5)..(5): Citrulline
  MOD_RES (7)..(7): Citrulline
TLLQXLXGTISKAVQN

SEQ ID NO: 2334 - protein, 16 aa, Artificial Sequence
  source: /note="Description of Artificial Sequence: Synthetic peptide"
  MOD_RES (1)..(1): Citrulline
  MOD_RES (3)..(3): Citrulline
XLXGTISKAVQNKVEG

SEQ ID NO: 2335 - protein, 16 aa, Artificial Sequence
  source: /note="Description of Artificial Sequence: Synthetic peptide"
  MOD_RES (9)..(9): Citrulline
MNGHSHSEXGSIFEES

SEQ ID NO: 2336 - protein, 16 aa, Artificial Sequence
  source: /note="Description of Artificial Sequence: Synthetic peptide"
  MOD_RES (11)..(11): Citrulline
DQPDSSSLKSXGSVHS

SEQ ID NO: 2337 - protein, 16 aa, Artificial Sequence
  source: /note="Description of Artificial Sequence: Synthetic peptide"
  MOD_RES (7)..(7): Citrulline
SSSLKSXGSVHSACSS

SEQ ID NO: 2338 - protein, 16 aa, Artificial Sequence
  source: /note="Description of Artificial Sequence: Synthetic peptide"
  MOD_RES (3)..(3): Citrulline
KSXGSVHSACSSEHKG

SEQ ID NO: 2339 - protein, 16 aa, Artificial Sequence
  source: /note="Description of Artificial Sequence: Synthetic peptide"
  MOD_RES (10)..(10): Citrulline
  MOD_RES (16)..(16): Citrulline
AVPGISAMSXGDLSQX

SEQ ID NO: 2340 - protein, 16 aa, Artificial Sequence
  source: /note="Description of Artificial Sequence: Synthetic peptide"
  MOD_RES (6)..(6): Citrulline
  MOD_RES (12)..(12): Citrulline
ISAMSXGDLSQXAKDL

SEQ ID NO: 2341 - protein, 16 aa, Artificial Sequence
  source: /note="Description of Artificial Sequence: Synthetic peptide"
  MOD_RES (7)..(7): Citrulline
VNSGFGXGLSDKKSGE

SEQ ID NO: 2342 - protein, 16 aa, Artificial Sequence
  source: /note="Description of Artificial Sequence: Synthetic peptide"
  MOD_RES (3)..(3): Citrulline
FGXGLSDKKSGESQVL

SEQ ID NO: 2343 - protein, 16 aa, Artificial Sequence
  source: /note="Description of Artificial Sequence: Synthetic peptide"
  MOD_RES (9)..(9): Citrulline
  MOD_RES (11)..(11): Citrulline
GLPSTASGXLXGTQEV

SEQ ID NO: 2344 - protein, 16 aa, Artificial Sequence
  source: /note="Description of Artificial Sequence: Synthetic peptide"
  MOD_RES (5)..(5): Citrulline
  MOD_RES (7)..(7): Citrulline
TASGXLXGTQEVAPPT

SEQ ID NO: 2345 - protein, 16 aa, Artificial Sequence
  source: /note="Description of Artificial Sequence: Synthetic peptide"
  MOD_RES (9)..(9): Citrulline
  MOD_RES (14)..(14): Citrulline
IASIFAWTXGLEHXGK

SEQ ID NO: 2346 - protein, 16 aa, Artificial Sequence
  source: /note="Description of Artificial Sequence: Synthetic peptide"
  MOD_RES (5)..(5): Citrulline
  MOD_RES (10)..(10): Citrulline
FAWTXGLEHXGKLDGN

SEQ ID NO: 2347 - protein, 16 aa, Artificial Sequence
  source: /note="Description of Artificial Sequence: Synthetic peptide"
  MOD_RES (1)..(1): Citrulline
  MOD_RES (6)..(6): Citrulline
XGLEHXGKLDGNQDLI

SEQ ID NO: 2348 - protein, 16 aa, Artificial Sequence
  source: /note="Description of Artificial Sequence: Synthetic peptide"
  MOD_RES (14)..(14): Citrulline
NEAFLQELELKTTXGK

SEQ ID NO: 2349 - protein, 13 aa, Artificial Sequence
  source: /note="Description of Artificial Sequence: Synthetic peptide"
  MOD_RES (10)..(10): Citrulline
LQELELKTTXGKM

SEQ ID NO: 2350 - protein, 16 aa, Artificial Sequence
  source: /note="Description of Artificial Sequence: Synthetic peptide"
  MOD_RES (9)..(9): Citrulline
QTKVEMTTXGGYTAPG

SEQ ID NO: 2351 - protein, 16 aa, Artificial Sequence
  source: /note="Description of Artificial Sequence: Synthetic peptide"
  MOD_RES (5)..(5): Citrulline
EMTTXGGYTAPGKELS

SEQ ID NO: 2352 - protein, 16 aa, Artificial Sequence
  source: /note="Description of Artificial Sequence: Synthetic peptide"
  MOD_RES (7)..(7): Citrulline
GDPNKTXGAPEALIAN

SEQ ID NO: 2353 - protein, 16 aa, Artificial Sequence
  source: /note="Description of Artificial Sequence: Synthetic peptide"
  MOD_RES (3)..(3): Citrulline
KTXGAPEALIANSGEP

SEQ ID NO: 2354 - protein, 16 aa, Artificial Sequence
  source: /note="Description of Artificial Sequence: Synthetic peptide"
  MOD_RES (10)..(11): Citrulline
PYCEVHYHEXXGSLCS

SEQ ID NO: 2355 - protein, 16 aa, Artificial Sequence
  source: /note="Description of Artificial Sequence: Synthetic peptide"
  MOD_RES (6)..(7): Citrulline
VHYHEXXGSLCSGCQK

SEQ ID NO: 2356 - protein, 16 aa, Artificial Sequence
  source: /note="Description of Artificial Sequence: Synthetic peptide"
  MOD_RES (10)..(10): Citrulline
  MOD_RES (13)..(13): Citrulline
GDLTADSVQXGSXHGL

SEQ ID NO: 2357 - protein, 16 aa, Artificial Sequence
  source: /note="Description of Artificial Sequence: Synthetic peptide"
  MOD_RES (6)..(6): Citrulline
  MOD_RES (9)..(9): Citrulline
ADSVQXGSXHGLEQYL

SEQ ID NO: 2358 - protein, 16 aa, Artificial Sequence
  source: /note="Description of Artificial Sequence: Synthetic peptide"
  MOD_RES (13)..(13): Citrulline
MKVEQYGPQTTPXGEL

SEQ ID NO: 2359 - protein, 16 aa, Artificial Sequence
  source: /note="Description of Artificial Sequence: Synthetic peptide"
  MOD_RES (9)..(9): Citrulline
QYGPQTTPXGELVPDP

SEQ ID NO: 2360 - protein, 16 aa, Artificial Sequence
  source: /note="Description of Artificial Sequence: Synthetic peptide"
  MOD_RES (11)..(11): Citrulline
PEWDGLICWPXGTVGK

SEQ ID NO: 2361 - protein, 16 aa, Artificial Sequence
  source: /note="Description of Artificial Sequence: Synthetic peptide"
  MOD_RES (13)..(13): Citrulline
NALFPPVEFPAPXGTP

SEQ ID NO: 2362 - protein, 16 aa, Artificial Sequence
  source: /note="Description of Artificial Sequence: Synthetic peptide"
  MOD_RES (9)..(9): Citrulline
PPVEFPAPXGTPLISP

SEQ ID NO: 2363 - protein, 16 aa, Artificial Sequence
  source: /note="Description of Artificial Sequence: Synthetic peptide"
  MOD_RES (8)..(8): Citrulline
  MOD_RES (11)..(11): Citrulline
KHFHYLKXGLXQLTDA

SEQ ID NO: 2364 - protein, 16 aa, Artificial Sequence
  source: /note="Description of Artificial Sequence: Synthetic peptide"
  MOD_RES (4)..(4): Citrulline
  MOD_RES (7)..(7): Citrulline
YLKXGLXQLTDAYECL

SEQ ID NO: 2365 - protein, 16 aa, Artificial Sequence
  source: /note="Description of Artificial Sequence: Synthetic peptide"
  MOD_RES (14)..(14): Citrulline
KCLAPTYLGEFSLXGK

SEQ ID NO: 2366 - protein, 16 aa, Artificial Sequence
  source: /note="Description of Artificial Sequence: Synthetic peptide"
  MOD_RES (10)..(10): Citrulline
  MOD_RES (15)..(15): Citrulline
PTYLGEFSLXGKELXE

SEQ ID NO: 2367 - protein, 16 aa, Artificial Sequence
  source: /note="Description of Artificial Sequence: Synthetic peptide"
  MOD_RES (6)..(6): Citrulline
  MOD_RES (11)..(11): Citrulline
GEFSLXGKELXENGIN

SEQ ID NO: 2368 - protein, 16 aa, Artificial Sequence
  source: /note="Description of Artificial Sequence: Synthetic peptide"
  MOD_RES (7)..(7): Citrulline
VKLVVSXGGLLGDLAS

SEQ ID NO: 2369 - protein, 16 aa, Artificial Sequence
  source: /note="Description of Artificial Sequence: Synthetic peptide"
  MOD_RES (3)..(3): Citrulline
VSXGGLLGDLASSDVA

SEQ ID NO: 2370 - protein, 16 aa, Artificial Sequence
  source: /note="Description of Artificial Sequence: Synthetic peptide"
  MOD_RES (3)..(3): Citrulline
  MOD_RES (13)..(13): Citrulline
PGXGTVVTGTLEXGIL

SEQ ID NO: 2371 - protein, 16 aa, Artificial Sequence
  source: /note="Description of Artificial Sequence: Synthetic peptide"
  MOD_RES (9)..(9): Citrulline
TVVTGTLEXGILKKGD

SEQ ID NO: 2372 - protein, 16 aa, Artificial Sequence
  source: /note="Description of Artificial Sequence: Synthetic peptide"
  MOD_RES (5)..(5): Citrulline
GTLEXGILKKGDECEL

SEQ ID NO: 2373 - protein, 16 aa, Artificial Sequence
  source: /note="Description of Artificial Sequence: Synthetic peptide"
  MOD_RES (10)..(10): Citrulline
  MOD_RES (15)..(15): Citrulline
IWADIPAPKXGEIVXQ

SEQ ID NO: 2374 - protein, 16 aa, Artificial Sequence
  source: /note="Description of Artificial Sequence: Synthetic peptide"
  MOD_RES (6)..(6): Citrulline
  MOD_RES (11)..(11): Citrulline
IPAPKXGEIVXQIGDA

SEQ ID NO: 2375 - protein, 16 aa, Artificial Sequence
  source: /note="Description of Artificial Sequence: Synthetic peptide"
  MOD_RES (8)..(8): Citrulline
  MOD_RES (10)..(10): Citrulline
HSAALLGXGXGQPAAA

SEQ ID NO: 2376 - protein, 16 aa, Artificial Sequence
  source: /note="Description of Artificial Sequence: Synthetic peptide"
  MOD_RES (4)..(4): Citrulline
  MOD_RES (6)..(6): Citrulline
LLGXGXGQPAAASQPG

SEQ ID NO: 2377 - protein, 16 aa, Artificial Sequence
  source: /note="Description of Artificial Sequence: Synthetic peptide"
  MOD_RES (10)..(10): Citrulline
CSQQSKQDSXGSPLLG

SEQ ID NO: 2378 - protein, 16 aa, Artificial Sequence
  source: /note="Description of Artificial Sequence: Synthetic peptide"
  MOD_RES (6)..(6): Citrulline
SKQDSXGSPLLGPVVP

SEQ ID NO: 2379 - protein, 16 aa, Artificial Sequence
  source: /note="Description of Artificial Sequence: Synthetic peptide"
  MOD_RES (2)..(2): Citrulline
SXGSPLLGPVVPGPSP

SEQ ID NO: 2380 - protein, 16 aa, Artificial Sequence
  source: /note="Description of Artificial Sequence: Synthetic peptide"
  MOD_RES (11)..(11): Citrulline
APSSAAFGFPXGAGPA

SEQ ID NO: 2381 - protein, 16 aa, Artificial Sequence
  source: /note="Description of Artificial Sequence: Synthetic peptide"
  MOD_RES (7)..(7): Citrulline
AAFGFPXGAGPAQPPA

SEQ ID NO: 2382 - protein, 16 aa, Artificial Sequence
  source: /note="Description of Artificial Sequence: Synthetic peptide"
  MOD_RES (13)..(13): Citrulline
MSAALFSLDGPAXGAP

SEQ ID NO: 2383 - protein, 16 aa, Artificial Sequence
  source: /note="Description of Artificial Sequence: Synthetic peptide"
  MOD_RES (9)..(9): Citrulline
LFSLDGPAXGAPWPAE

SEQ ID NO: 2384 - protein, 16 aa, Artificial Sequence
  source: /note="Description of Artificial Sequence: Synthetic peptide"
  MOD_RES (5)..(5): Citrulline
DGPAXGAPWPAEPAPF

SEQ ID NO: 2385 - protein, 16 aa, Artificial Sequence
  source: /note="Description of Artificial Sequence: Synthetic peptide"
  MOD_RES (6)..(6): Citrulline
GKHKVXGDINVLLCGD

SEQ ID NO: 2386 - protein, 16 aa, Artificial Sequence
  source: /note="Description of Artificial Sequence: Synthetic peptide"
  MOD_RES (2)..(2): Citrulline
VXGDINVLLCGDPGTA

SEQ ID NO: 2387 - protein, 16 aa, Artificial Sequence
  source: /note="Description of Artificial Sequence: Synthetic peptide"
  MOD_RES (10)..(10): Citrulline
PGFHCEACPXGYKGTQ

SEQ ID NO: 2388 - protein, 16 aa, Artificial Sequence
  source: /note="Description of Artificial Sequence: Synthetic peptide"
  MOD_RES (6)..(6): Citrulline
CEACPXGYKGTQVSGV

SEQ ID NO: 2389 - protein, 16 aa, Artificial Sequence
  source: /note="Description of Artificial Sequence: Synthetic peptide"
  MOD_RES (13)..(13): Citrulline
HNCVPNSVCINTXGSF

SEQ ID NO: 2390 - protein, 16 aa, Artificial Sequence
  source: /note="Description of Artificial Sequence: Synthetic peptide"
  MOD_RES (9)..(9): Citrulline
PNSVCINTXGSFQCGP

SEQ ID NO: 2391 - protein, 16 aa, Artificial Sequence
  source: /note="Description of Artificial Sequence: Synthetic peptide"
  MOD_RES (5)..(5): Citrulline
CINTXGSFQCGPCQPG

SEQ ID NO: 2392 - protein, 16 aa, Artificial Sequence
  source: /note="Description of Artificial Sequence: Synthetic peptide"
  MOD_RES (11)..(11): Citrulline
QLKAISPYLPXGDPVL

SEQ ID NO: 2393 - protein, 16 aa, Artificial Sequence
  source: /note="Description of Artificial Sequence: Synthetic peptide"
  MOD_RES (7)..(7): Citrulline
ISPYLPXGDPVLKPLI

SEQ ID NO: 2394 - protein, 16 aa, Artificial Sequence
  source: /note="Description of Artificial Sequence: Synthetic peptide"
  MOD_RES (3)..(3): Citrulline
LPXGDPVLKPLIYEMI

SEQ ID NO: 2395 - protein, 16 aa, Artificial Sequence
  source: /note="Description of Artificial Sequence: Synthetic peptide"
  MOD_RES (5)..(5): Citrulline
  MOD_RES (12)..(12): Citrulline
GGWEXYTEVAKXGGQH

SEQ ID NO: 2396 - protein, 16 aa, Artificial Sequence
  source: /note="Description of Artificial Sequence: Synthetic peptide"
  MOD_RES (1)..(1): Citrulline
  MOD_RES (8)..(8): Citrulline
XYTEVAKXGGQHTLPA

SEQ ID NO: 2397 - protein, 16 aa, Artificial Sequence
  source: /note="Description of Artificial Sequence: Synthetic peptide"
  MOD_RES (4)..(4): Citrulline
  MOD_RES (15)..(15): Citrulline
VAKXGGQHTLPALSXA

SEQ ID NO: 2398 - protein, 16 aa, Artificial Sequence
  source: /note="Description of Artificial Sequence: Synthetic peptide"
  MOD_RES (4)..(4): Citrulline
  MOD_RES (11)..(11): Citrulline
HDWXLKGSLSXGDWYK

SEQ ID NO: 2399 - protein, 16 aa, Artificial Sequence
  source: /note="Description of Artificial Sequence: Synthetic peptide"
  MOD_RES (7)..(7): Citrulline
LKGSLSXGDWYKTKEI

SEQ ID NO: 2400 - protein, 16 aa, Artificial Sequence
  source: /note="Description of Artificial Sequence: Synthetic peptide"
  MOD_RES (8)..(8): Citrulline
GSAKQLVXGEPNVSYI

SEQ ID NO: 2401 - protein, 16 aa, Artificial Sequence
  source: /note="Description of Artificial Sequence: Synthetic peptide"
  MOD_RES (13)..(13): Citrulline
KLCDFGSAKQLVXGEP

SEQ ID NO: 2402 - protein, 16 aa, Artificial Sequence
  source: /note="Description of Artificial Sequence: Synthetic peptide"
  MOD_RES (9)..(9): Citrulline
FGSAKQLVXGEPNVSY

SEQ ID NO: 2403 - protein, 16 aa, Artificial Sequence
  source: /note="Description of Artificial Sequence: Synthetic peptide"
  MOD_RES (10)..(10): Citrulline
KILTHKNTVXGEIISH

SEQ ID NO: 2404 - protein, 16 aa, Artificial Sequence
  source: /note="Description of Artificial Sequence: Synthetic peptide"
  MOD_RES (6)..(6): Citrulline
HKNTVXGEIISHDGCE

SEQ ID NO: 2405 - protein, 16 aa, Artificial Sequence
  source: /note="Description of Artificial Sequence: Synthetic peptide"
  MOD_RES (10)..(10): Citrulline
MGTVTLNQAXGSFDIS

SEQ ID NO: 2406 - protein, 16 aa, Artificial Sequence
  source: /note="Description of Artificial Sequence: Synthetic peptide"
  MOD_RES (6)..(6): Citrulline
TLNQAXGSFDISCDKD

SEQ ID NO: 2407 - protein, 16 aa, Artificial Sequence
  source: /note="Description of Artificial Sequence: Synthetic peptide"
  MOD_RES (12)..(12): Citrulline
IKVWEGIPESPXGSFM

SEQ ID NO: 2408 - protein, 16 aa, Artificial Sequence
  source: /note="Description of Artificial Sequence: Synthetic peptide"
  MOD_RES (8)..(8): Citrulline
EGIPESPXGSFMGSDE

SEQ ID NO: 2409 - protein, 16 aa, Artificial Sequence
  source: /note="Description of Artificial Sequence: Synthetic peptide"
  MOD_RES (3)..(3): Citrulline
  MOD_RES (10)..(10): Citrulline
AEXWSQWSLXGGLEML

SEQ ID NO: 2410 - protein, 16 aa, Artificial Sequence
  source: /note="Description of Artificial Sequence: Synthetic peptide"
  MOD_RES (6)..(6): Citrulline
SQWSLXGGLEMLPQAL

SEQ ID NO: 2411 - protein, 16 aa, Artificial Sequence
  source: /note="Description of Artificial Sequence: Synthetic peptide"
  MOD_RES (7)..(7): Citrulline
  MOD_RES (13)..(13): Citrulline
ETHLTSXGVSVLXGQP

SEQ ID NO: 2412 - protein, 16 aa, Artificial Sequence
  source: /note="Description of Artificial Sequence: Synthetic peptide"
  MOD_RES (3)..(3): Citrulline
  MOD_RES (9)..(9): Citrulline
TSXGVSVLXGQPVCGL

SEQ ID NO: 2413 - protein, 16 aa, Artificial Sequence
  source: /note="Description of Artificial Sequence: Synthetic peptide"
  MOD_RES (7)..(7): Citrulline
  MOD_RES (9)..(9): Citrulline
EEYIYLXGXGPLMVNS

SEQ ID NO: 2414 - protein, 16 aa, Artificial Sequence
  source: /note="Description of Artificial Sequence: Synthetic peptide"
  MOD_RES (3)..(3): Citrulline
  MOD_RES (5)..(5): Citrulline
YLXGXGPLMVNSNYYA

SEQ ID NO: 2415 - protein, 16 aa, Artificial Sequence
  source: /note="Description of Artificial Sequence: Synthetic peptide"
  MOD_RES (9)..(9): Citrulline
  MOD_RES (13)..(13): Citrulline
GKWNEQFDXKYTXGML

SEQ ID NO: 2416 - protein, 16 aa, Artificial Sequence
  source: /note="Description of Artificial Sequence: Synthetic peptide"
  MOD_RES (5)..(5): Citrulline
  MOD_RES (9)..(9): Citrulline
EQFDXKYTXGMLFKTN

SEQ ID NO: 2417 - protein, 16 aa, Artificial Sequence
  source: /note="Description of Artificial Sequence: Synthetic peptide"
  MOD_RES (1)..(1): Citrulline
  MOD_RES (5)..(5): Citrulline
XKYTXGMLFKTNEEKK

SEQ ID NO: 2418 - protein, 16 aa, Artificial Sequence
  source: /note="Description of Artificial Sequence: Synthetic peptide"
  MOD_RES (12)..(12): Citrulline
INPDSAQPYKWXGKAH

SEQ ID NO: 2419 - protein, 16 aa, Artificial Sequence
  source: /note="Description of Artificial Sequence: Synthetic peptide"
  MOD_RES (11)..(11): Citrulline
SNSHFIAWTGXGMEFK

SEQ ID NO: 2420 - protein, 16 aa, Artificial Sequence
  source: /note="Description of Artificial Sequence: Synthetic peptide"
  MOD_RES (7)..(7): Citrulline
FIAWTGXGMEFKLIEP

SEQ ID NO: 2421 - protein, 16 aa, Artificial Sequence
  source: /note="Description of Artificial Sequence: Synthetic peptide"
  MOD_RES (6)..(6): Citrulline
  MOD_RES (8)..(8): Citrulline
HITGTXGXSNTLSSPN

SEQ ID NO: 2422 - protein, 16 aa, Artificial Sequence
  source: /note="Description of Artificial Sequence: Synthetic peptide"
  MOD_RES (2)..(2): Citrulline
  MOD_RES (4)..(4): Citrulline
TXGXSNTLSSPNSKNE

SEQ ID NO: 2423 - protein, 16 aa, Artificial Sequence
  source: /note="Description of Artificial Sequence: Synthetic peptide"
  MOD_RES (11)..(11): Citrulline
ECQQHSQLKTXGDKAL

SEQ ID NO: 2424 - protein, 16 aa, Artificial Sequence
  source: /note="Description of Artificial Sequence: Synthetic peptide"
  MOD_RES (7)..(7): Citrulline
HSQLKTXGDKALKPMH

SEQ ID NO: 2425 - protein, 16 aa, Artificial Sequence
  source: /note="Description of Artificial Sequence: Synthetic peptide"
  MOD_RES (13)..(13): Citrulline
TPSQLLIEPHPPXGSA

SEQ ID NO: 2426 - protein, 16 aa, Artificial Sequence
  source: /note="Description of Artificial Sequence: Synthetic peptide"
  MOD_RES (9)..(9): Citrulline
LLIEPHPPXGSAMQVS

SEQ ID NO: 2427 - protein, 16 aa, Artificial Sequence
  source: /note="Description of Artificial Sequence: Synthetic peptide"
  MOD_RES (5)..(5): Citrulline
PHPPXGSAMQVSPLMF

SEQ ID NO: 2428 - protein, 16 aa, Artificial Sequence
  source: /note="Description of Artificial Sequence: Synthetic peptide"
  MOD_RES (1)..(1): Citrulline
XGSAMQVSPLMFTDKA

SEQ ID NO: 2429 - protein, 16 aa, Artificial Sequence
  source: /note="Description of Artificial Sequence: Synthetic peptide"
  MOD_RES (13)..(13): Citrulline
NLEGNLTLEGVTXGQS

SEQ ID NO: 2430 - protein, 16 aa, Artificial Sequence
  source: /note="Description of Artificial Sequence: Synthetic peptide"
  MOD_RES (9)..(9): Citrulline
NLTLEGVTXGQSGTYG

SEQ ID NO: 2431 - protein, 16 aa, Artificial Sequence
  source: /note="Description of Artificial Sequence: Synthetic peptide"
  MOD_RES (12)..(12): Citrulline
CQLNLPSGKFPXGFKF

SEQ ID NO: 2432 - protein, 16 aa, Artificial Sequence
  source: /note="Description of Artificial Sequence: Synthetic peptide"
  MOD_RES (8)..(8): Citrulline
LPSGKFPXGFKFDTDE

SEQ ID NO: 2433 - protein, 16 aa, Artificial Sequence
  source: /note="Description of Artificial Sequence: Synthetic peptide"
  MOD_RES (4)..(4): Citrulline
KFPXGFKFDTDELNFP

SEQ ID NO: 2434 - protein, 16 aa, Artificial Sequence
  source: /note="Description of Artificial Sequence: Synthetic peptide"
  MOD_RES (11)..(11): Citrulline
PAVPPTQFGSXGTITD

SEQ ID NO: 2435 - protein, 16 aa, Artificial Sequence
  source: /note="Description of Artificial Sequence: Synthetic peptide"
  MOD_RES (7)..(7): Citrulline
PTQFGSXGTITDAPGF

SEQ ID NO: 2436 - protein, 16 aa, Artificial Sequence
  source: /note="Description of Artificial Sequence: Synthetic peptide"
  MOD_RES (5)..(5): Citrulline
  MOD_RES (11)..(11): Citrulline
GLGFXPPGSGXGSGGS

SEQ ID NO: 2437 - protein, 16 aa, Artificial Sequence
  source: /note="Description of Artificial Sequence: Synthetic peptide"
  MOD_RES (1)..(1): Citrulline
  MOD_RES (7)..(7): Citrulline
XPPGSGXGSGGSDKAG

SEQ ID NO: 2438 - protein, 16 aa, Artificial Sequence
  source: /note="Description of Artificial Sequence: Synthetic peptide"
  MOD_RES (10)..(10): Citrulline
CGHYLYPLPXGEKYCN

SEQ ID NO: 2439 - protein, 16 aa, Artificial Sequence
  source: /note="Description of Artificial Sequence: Synthetic peptide"
  MOD_RES (6)..(6): Citrulline
  MOD_RES (14)..(14): Citrulline
LYPLPXGEKYCNNXDF

SEQ ID NO: 2440 - protein, 16 aa, Artificial Sequence
  source: /note="Description of Artificial Sequence: Synthetic peptide"
  MOD_RES (9)..(9): Citrulline
VFISGVIAXGDKDFPP

SEQ ID NO: 2441 - protein, 16 aa, Artificial Sequence
  source: /note="Description of Artificial Sequence: Synthetic peptide"
  MOD_RES (5)..(5): Citrulline
GVIAXGDKDFPPAAAQ

SEQ ID NO: 2442 - protein, 16 aa, Artificial Sequence
  source: /note="Description of Artificial Sequence: Synthetic peptide"
  MOD_RES (1)..(1): Citrulline
  MOD_RES (8)..(8): Citrulline
XSLFALSXGYVKEINM

SEQ ID NO: 2443 - protein, 16 aa, Artificial Sequence
  source: /note="Description of Artificial Sequence: Synthetic peptide"
  MOD_RES (4)..(4): Citrulline
ALSXGYVKEINMTTVT

SEQ ID NO: 2444 - protein, 16 aa, Artificial Sequence
  source: /note="Description of Artificial Sequence: Synthetic peptide"
  MOD_RES (10)..(10): Citrulline
QILAYKMLAXGQPLPE

SEQ ID NO: 2445 - protein, 16 aa, Artificial Sequence
  source: /note="Description of Artificial Sequence: Synthetic peptide"
  MOD_RES (6)..(6): Citrulline
YKMLAXGQPLPETLQL

SEQ ID NO: 2446 - protein, 16 aa, Artificial Sequence
  source: /note="Description of Artificial Sequence: Synthetic peptide"
  MOD_RES (1)..(1): Citrulline
  MOD_RES (12)..(12): Citrulline
XAQIMAYKMLAXGQPL

SEQ ID NO: 2447 - protein, 16 aa, Artificial Sequence
  source: /note="Description of Artificial Sequence: Synthetic peptide"
  MOD_RES (8)..(8): Citrulline
MAYKMLAXGQPLPDHL

SEQ ID NO: 2448 - protein, 16 aa, Artificial Sequence
  source: /note="Description of Artificial Sequence: Synthetic peptide"
  MOD_RES (4)..(4): Citrulline
MLAXGQPLPDHLQMAV

SEQ ID NO: 2449 - protein, 16 aa, Artificial Sequence
  source: /note="Description of Artificial Sequence: Synthetic peptide"
  MOD_RES (7)..(7): Citrulline
TTKAEDXGMLLKTFNE

SEQ ID NO: 2450 - protein, 16 aa, Artificial Sequence
  source: /note="Description of Artificial Sequence: Synthetic peptide"
  MOD_RES (3)..(3): Citrulline
EDXGMLLKTFNEPGSE

SEQ ID NO: 2451 - protein, 16 aa, Artificial Sequence
  source: /note="Description of Artificial Sequence: Synthetic peptide"
  MOD_RES (15)..(15): Citrulline
ALYADVGGKQFPVTXG

SEQ ID NO: 2452 - protein, 16 aa, Artificial Sequence
  source: /note="Description of Artificial Sequence: Synthetic peptide"
  MOD_RES (11)..(11): Citrulline
DVGGKQFPVTXGQDVG

SEQ ID NO: 2453 - protein, 16 aa, Artificial Sequence
  source: /note="Description of Artificial Sequence: Synthetic peptide"
  MOD_RES (7)..(7): Citrulline
  MOD_RES (13)..(13): Citrulline
KQFPVTXGQDVGXYQV

SEQ ID NO: 2454 - protein, 16 aa, Artificial Sequence
  source: /note="Description of Artificial Sequence: Synthetic peptide"
  MOD_RES (9)..(9): Citrulline
  MOD_RES (14)..(14): Citrulline
TAAEKYKHXGEGEXKD

SEQ ID NO: 2455 - protein, 16 aa, Artificial Sequence
  source: /note="Description of Artificial Sequence: Synthetic peptide"
  MOD_RES (5)..(5): Citrulline
  MOD_RES (10)..(10): Citrulline
KYKHXGEGEXKDIVSS

SEQ ID NO: 2456 - protein, 16 aa, Artificial Sequence
  source: /note="Description of Artificial Sequence: Synthetic peptide"
  MOD_RES (11)..(11): Citrulline
ATNQWFIPAVXGDIPP

SEQ ID NO: 2457 - protein, 16 aa, Artificial Sequence
  source: /note="Description of Artificial Sequence: Synthetic peptide"
  MOD_RES (5)..(5): Citrulline
  MOD_RES (9)..(9): Citrulline
FFSGXLKAXGNIMLSQ

SEQ ID NO: 2458 - protein, 16 aa, Artificial Sequence
  source: /note="Description of Artificial Sequence: Synthetic peptide"
  MOD_RES (12)..(12): Citrulline
  MOD_RES (15)..(15): Citrulline
VTFINPHFGSKXGSXA

SEQ ID NO: 2459 - protein, 16 aa, Artificial Sequence
  source: /note="Description of Artificial Sequence: Synthetic peptide"
  MOD_RES (8)..(8): Citrulline
  MOD_RES (11)..(11): Citrulline
NPHFGSKXGSXASVSF

SEQ ID NO: 2460 - protein, 16 aa, Artificial Sequence
  source: /note="Description of Artificial Sequence: Synthetic peptide"
  MOD_RES (6)..(6): Citrulline
QEVMVXGTPFCMMDLP

SEQ ID NO: 2461 - protein, 16 aa, Artificial Sequence
  source: /note="Description of Artificial Sequence: Synthetic peptide"
  MOD_RES (8)..(8): Citrulline
VAKTFKGXGTPSIEDA

SEQ ID NO: 2462 - protein, 16 aa, Artificial Sequence
  source: /note="Description of Artificial Sequence: Synthetic peptide"
  MOD_RES (6)..(6): Citrulline
  MOD_RES (8)..(8): Citrulline
SAGSQXGXGGGSGNFM

SEQ ID NO: 2463 - protein, 16 aa, Artificial Sequence
  source: /note="Description of Artificial Sequence: Synthetic peptide"
  MOD_RES (10)..(10): Citrulline
GGGSGNFMGXGGNFGG

SEQ ID NO: 2464 - protein, 16 aa, Artificial Sequence
  source: /note="Description of Artificial Sequence: Synthetic peptide"
  MOD_RES (6)..(6): Citrulline
GNFMGXGGNFGGGGGN

SEQ ID NO: 2465 - protein, 16 aa, Artificial Sequence
  source: /note="Description of Artificial Sequence: Synthetic peptide"
  MOD_RES (2)..(2): Citrulline
  MOD_RES (15)..(15): Citrulline
GXGGNFGGGGGNFGXG

SEQ ID NO: 2466 - protein, 16 aa, Artificial Sequence
  source: /note="Description of Artificial Sequence: Synthetic peptide"
  MOD_RES (11)..(11): Citrulline
NFGGGGGNFGXGGNFG

SEQ ID NO: 2467 - protein, 16 aa, Artificial Sequence
  source: /note="Description of Artificial Sequence: Synthetic peptide"
  MOD_RES (7)..(7): Citrulline
  MOD_RES (14)..(14): Citrulline
GGGNFGXGGNFGGXGG

SEQ ID NO: 2468 - protein, 16 aa, Artificial Sequence
  source: /note="Description of Artificial Sequence: Synthetic peptide"
  MOD_RES (3)..(3): Citrulline
  MOD_RES (10)..(10): Citrulline
FGXGGNFGGXGGYGGG

SEQ ID NO: 2469 - protein, 16 aa, Artificial Sequence
  source: /note="Description of Artificial Sequence: Synthetic peptide"
  MOD_RES (6)..(6): Citrulline
GNFGGXGGYGGGGGGS

SEQ ID NO: 2470 - protein, 15 aa, Artificial Sequence
  source: /note="Description of Artificial Sequence: Synthetic peptide"
  MOD_RES (2)..(2): Citrulline
  MOD_RES (13)..(13): Citrulline
GXGGYGGGGGGSXGS

SEQ ID NO: 2471 - protein, 16 aa, Artificial Sequence
  source: /note="Description of Artificial Sequence: Synthetic peptide"
  MOD_RES (9)..(9): Citrulline
YGGGGGGSXGSYGGGD

SEQ ID NO: 2472 - protein, 16 aa, Artificial Sequence
  source: /note="Description of Artificial Sequence: Synthetic peptide"
  MOD_RES (5)..(5): Citrulline
GGGSXGSYGGGDGGYN

SEQ ID NO: 2473 - protein, 16 aa, Artificial Sequence
  source: /note="Description of Artificial Sequence: Synthetic peptide"
  MOD_RES (14)..(14): Citrulline
DGGNYGGGPGYSSXGG

SEQ ID NO: 2474 - protein, 16 aa, Artificial Sequence
  source: /note="Description of Artificial Sequence: Synthetic peptide"
  MOD_RES (10)..(10): Citrulline
YGGGPGYSSXGGYGGG

SEQ ID NO: 2475 - protein, 16 aa, Artificial Sequence
  source: /note="Description of Artificial Sequence: Synthetic peptide"
  MOD_RES (6)..(6): Citrulline
PGYSSXGGYGGGGPGY

SEQ ID NO: 2476 - protein, 16 aa, Artificial Sequence
  source: /note="Description of Artificial Sequence: Synthetic peptide"
  MOD_RES (2)..(2): Citrulline
SXGGYGGGGPGYGNQG

SEQ ID NO: 2477 - protein, 16 aa, Artificial Sequence
  source: /note="Description of Artificial Sequence: Synthetic peptide"
  MOD_RES (10)..(10): Citrulline
NEILSNALKXGEIIAK

SEQ ID NO: 2478 - protein, 16 aa, Artificial Sequence
  source: /note="Description of Artificial Sequence: Synthetic peptide"
  MOD_RES (6)..(6): Citrulline
SNALKXGEIIAKQGGG

SEQ ID NO: 2479 - protein, 16 aa, Artificial Sequence
  source: /note="Description of Artificial Sequence: Synthetic peptide"
  MOD_RES (2)..(2): Citrulline
KXGEIIAKQGGGGGGG

SEQ ID NO: 2480 - protein, 16 aa, Artificial Sequence
  source: /note="Description of Artificial Sequence: Synthetic peptide"
  MOD_RES (9)..(9): Citrulline
EAPKGMLAXGTYHNKS

SEQ ID NO: 2481 - protein, 16 aa, Artificial Sequence
  source: /note="Description of Artificial Sequence: Synthetic peptide"
  MOD_RES (8)..(8): Citrulline
NPFQTNAXGATAATFG

SEQ ID NO: 2482 - protein, 16 aa, Artificial Sequence
  source: /note="Description of Artificial Sequence: Synthetic peptide"
  MOD_RES (6)..(6): Citrulline
  MOD_RES (8)..(8): Citrulline
NDGFVXLXGLPFGCTK

SEQ ID NO: 2483 - protein, 16 aa, Artificial Sequence
  source: /note="Description of Artificial Sequence: Synthetic peptide"
  MOD_RES (2)..(2): Citrulline
  MOD_RES (4)..(4): Citrulline
VXLXGLPFGCTKEEIV

SEQ ID NO: 2484 - protein, 16 aa, Artificial Sequence
  source: /note="Description of Artificial Sequence: Synthetic peptide"
  MOD_RES (10)..(10): Citrulline
SWQFSSYVGXGLNSDQ

SEQ ID NO: 2485 - protein, 16 aa, Artificial Sequence
  source: /note="Description of Artificial Sequence: Synthetic peptide"
  MOD_RES (6)..(6): Citrulline
SSYVGXGLNSDQLSML

SEQ ID NO: 2486 - protein, 16 aa, Artificial Sequence
  source: /note="Description of Artificial Sequence: Synthetic peptide"
  MOD_RES (9)..(9): Citrulline
  MOD_RES (12)..(12): Citrulline
QSPHTWGTXGKXEKPD

SEQ ID NO: 2487 - protein, 16 aa, Artificial Sequence
  source: /note="Description of Artificial Sequence: Synthetic peptide"
  MOD_RES (5)..(5): Citrulline
  MOD_RES (8)..(8): Citrulline
TWGTXGKXEKPDLNVL

SEQ ID NO: 2488 - protein, 16 aa, Artificial Sequence
  source: /note="Description of Artificial Sequence: Synthetic peptide"
  MOD_RES (9)..(9): Citrulline
  MOD_RES (11)..(11): Citrulline
MLLKDMAVXGXLLTAL

SEQ ID NO: 2489 - protein, 16 aa, Artificial Sequence
  source: /note="Description of Artificial Sequence: Synthetic peptide"
  MOD_RES (5)..(5): Citrulline
  MOD_RES (7)..(7): Citrulline
DMAVXGXLLTALVLPD

SEQ ID NO: 2490 - protein, 16 aa, Artificial Sequence
  source: /note="Description of Artificial Sequence: Synthetic peptide"
  MOD_RES (6)..(6): Citrulline
  MOD_RES (10)..(10): Citrulline
VMTSLXNWYXGDNPNK

SEQ ID NO: 2491 - protein, 16 aa, Artificial Sequence
  source: /note="Description of Artificial Sequence: Synthetic peptide"
  MOD_RES (2)..(2): Citrulline
  MOD_RES (6)..(6): Citrulline
LXNWYXGDNPNKPMNP

SEQ ID NO: 2492 - protein, 16 aa, Artificial Sequence
  source: /note="Description of Artificial Sequence: Synthetic peptide"
  MOD_RES (2)..(2): Citrulline
YXGDNPNKPMNPLITG

SEQ ID NO: 2493 - protein, 16 aa, Artificial Sequence
  source: /note="Description of Artificial Sequence: Synthetic peptide"
  MOD_RES (7)..(7): Citrulline
  MOD_RES (12)..(12): Citrulline
PQPQNGXSISKXGVSC

SEQ ID NO: 2494 - protein, 16 aa, Artificial Sequence
  source: /note="Description of Artificial Sequence: Synthetic peptide"
  MOD_RES (3)..(3): Citrulline
  MOD_RES (8)..(8): Citrulline
NGXSISKXGVSCQFGP

SEQ ID NO: 2495 - protein, 16 aa, Artificial Sequence
  source: /note="Description of Artificial Sequence: Synthetic peptide"
  MOD_RES (4)..(4): Citrulline
ISKXGVSCQFGPDVTK

SEQ ID NO: 2496 - protein, 16 aa, Artificial Sequence
  source: /note="Description of Artificial Sequence: Synthetic peptide"
  MOD_RES (9)..(9): Citrulline
  MOD_RES (12)..(12): Citrulline
QILQLLIKXGSXIDVQ

SEQ ID NO: 2497 - protein, 16 aa, Artificial Sequence
  source: /note="Description of Artificial Sequence: Synthetic peptide"
  MOD_RES (5)..(5): Citrulline
  MOD_RES (8)..(8): Citrulline
LLIKXGSXIDVQDKGG

SEQ ID NO: 2498 - protein, 16 aa, Artificial Sequence
  source: /note="Description of Artificial Sequence: Synthetic peptide"
  MOD_RES (1)..(1): Citrulline
  MOD_RES (4)..(4): Citrulline
XGSXIDVQDKGGSNAV

SEQ ID NO: 2499 - protein, 16 aa, Artificial Sequence
  source: /note="Description of Artificial Sequence: Synthetic peptide"
  MOD_RES (9)..(9): Citrulline
  MOD_RES (15)..(15): Citrulline
GTEEYKICXGIKEGXL

SEQ ID NO: 2500 - protein, 16 aa, Artificial Sequence
  source: /note="Description of Artificial Sequence: Synthetic peptide"
  MOD_RES (5)..(5): Citrulline
  MOD_RES (11)..(11): Citrulline
YKICXGIKEGXLTKPI

SEQ ID NO: 2501 - protein, 16 aa, Artificial Sequence
  source: /note="Description of Artificial Sequence: Synthetic peptide"
  MOD_RES (1)..(1): Citrulline
  MOD_RES (13)..(13): Citrulline
XGKPGMSGHNGSXGDP

SEQ ID NO: 2502 - protein, 16 aa, Artificial Sequence
  source: /note="Description of Artificial Sequence: Synthetic peptide"
  MOD_RES (1)..(1): Citrulline
  MOD_RES (10)..(10): Citrulline
XGDPGFPGGXGALGPG

SEQ ID NO: 2503 - protein, 16 aa, Artificial Sequence
  source: /note="Description of Artificial Sequence: Synthetic peptide"
  MOD_RES (6)..(6): Citrulline
GFPGGXGALGPGGPLG

SEQ ID NO: 2504 - protein, 16 aa, Artificial Sequence
  source: /note="Description of Artificial Sequence: Synthetic peptide"
  MOD_RES (7)..(7): Citrulline
  MOD_RES (10)..(10): Citrulline
SGLPGDXGLXGAKGAI

SEQ ID NO: 2505 - protein, 16 aa, Artificial Sequence
  source: /note="Description of Artificial Sequence: Synthetic peptide"
  MOD_RES (3)..(3): Citrulline
  MOD_RES (6)..(6): Citrulline
GDXGLXGAKGAIGPPG

SEQ ID NO: 2506 - protein, 16 aa, Artificial Sequence
  source: /note="Description of Artificial Sequence: Synthetic peptide"
  MOD_RES (10)..(10): Citrulline
  MOD_RES (15)..(15): Citrulline
QGLPGIQGPXGSPGXP

SEQ ID NO: 2507 - protein, 16 aa, Artificial Sequence
  source: /note="Description of Artificial Sequence: Synthetic peptide"
  MOD_RES (6)..(6): Citrulline
  MOD_RES (11)..(11): Citrulline
GIQGPXGSPGXPGPPG

SEQ ID NO: 2508 - protein, 16 aa, Artificial Sequence
  source: /note="Description of Artificial Sequence: Synthetic peptide"
  MOD_RES (6)..(6): Citrulline
  MOD_RES (10)..(10): Citrulline
CAASYXPIYXGKPVEK

SEQ ID NO: 2509 - protein, 16 aa, Artificial Sequence
  source: /note="Description of Artificial Sequence: Synthetic peptide"
  MOD_RES (2)..(2): Citrulline
  MOD_RES (6)..(6): Citrulline
YXPIYXGKPVEKCPLS

SEQ ID NO: 2510 - protein, 16 aa, Artificial Sequence
  source: /note="Description of Artificial Sequence: Synthetic peptide"
  MOD_RES (6)..(6): Citrulline
KGGTLXGIIKSMDSQY

SEQ ID NO: 2511 - protein, 16 aa, Artificial Sequence
  source: /note="Description of Artificial Sequence: Synthetic peptide"
  MOD_RES (7)..(7): Citrulline
  MOD_RES (10)..(10): Citrulline
MSPGASXGPXGSQAPL

SEQ ID NO: 2512 - protein, 16 aa, Artificial Sequence
  source: /note="Description of Artificial Sequence: Synthetic peptide"
  MOD_RES (3)..(3): Citrulline
  MOD_RES (6)..(6): Citrulline
ASXGPXGSQAPLIAPL

SEQ ID NO: 2513 - protein, 16 aa, Artificial Sequence
  source: /note="Description of Artificial Sequence: Synthetic peptide"
  MOD_RES (11)..(11): Citrulline
AVPSGFGFTLXGDSDI

SEQ ID NO: 2514 - protein, 16 aa, Artificial Sequence
  source: /note="Description of Artificial Sequence: Synthetic peptide"
  MOD_RES (5)..(5): Citrulline
  MOD_RES (16)..(16): Citrulline
KFAYXGVLNSPVKAVX

SEQ ID NO: 2515 - protein, 16 aa, Artificial Sequence
  source: /note="Description of Artificial Sequence: Synthetic peptide"
  MOD_RES (10)..(10): Citrulline
PGQPLALTAXGGPKDT

SEQ ID NO: 2516 - protein, 16 aa, Artificial Sequence
  source: /note="Description of Artificial Sequence: Synthetic peptide"
  MOD_RES (6)..(6): Citrulline
LALTAXGGPKDTQPSY

SEQ ID NO: 2517 - protein, 16 aa, Artificial Sequence
  source: /note="Description of Artificial Sequence: Synthetic peptide"
  MOD_RES (2)..(2): Citrulline
AXGGPKDTQPSYHHGN

SEQ ID NO: 2518 - protein, 16 aa, Artificial Sequence
  source: /note="Description of Artificial Sequence: Synthetic peptide"
  MOD_RES (8)..(8): Citrulline
  MOD_RES (11)..(11): Citrulline
GWMTLQGXKSXGTDLH

SEQ ID NO: 2519 - protein, 16 aa, Artificial Sequence
  source: /note="Description of Artificial Sequence: Synthetic peptide"
  MOD_RES (4)..(4): Citrulline
  MOD_RES (7)..(7): Citrulline
LQGXKSXGTDLHSKTA

SEQ ID NO: 2520 - protein, 16 aa, Artificial Sequence
  source: /note="Description of Artificial Sequence: Synthetic peptide"
  MOD_RES (1)..(1): Citrulline
  MOD_RES (9)..(9): Citrulline
XGESFYQDXMNDIVKE

SEQ ID NO: 2521 - protein, 16 aa, Artificial Sequence
  source: /note="Description of Artificial Sequence: Synthetic peptide"
  MOD_RES (8)..(8): Citrulline
  MOD_RES (12)..(12): Citrulline
FQGPFGSXATGXGTGK

SEQ ID NO: 2522 - protein, 16 aa, Artificial Sequence
  source: /note="Description of Artificial Sequence: Synthetic peptide"
  MOD_RES (4)..(4): Citrulline
  MOD_RES (8)..(8): Citrulline
FGSXATGXGTGKAAGI

SEQ ID NO: 2523 - protein, 16 aa, Artificial Sequence
  source: /note="Description of Artificial Sequence: Synthetic peptide"
  MOD_RES (6)..(6): Citrulline
  MOD_RES (14)..(14): Citrulline
SPPSFXTGTPPGYXGT

SEQ ID NO: 2524 - protein, 16 aa, Artificial Sequence
  source: /note="Description of Artificial Sequence: Synthetic peptide"
  MOD_RES (2)..(2): Citrulline
  MOD_RES (10)..(10): Citrulline
FXTGTPPGYXGTSPPA

SEQ ID NO: 2525 - protein, 16 aa, Artificial Sequence
  source: /note="Description of Artificial Sequence: Synthetic peptide"
  MOD_RES (8)..(8): Citrulline
ISADEWSXGNILKNSV

SEQ ID NO: 2526 - protein, 16 aa, Artificial Sequence
  source: /note="Description of Artificial Sequence: Synthetic peptide"
  MOD_RES (4)..(4): Citrulline
EWSXGNILKNSVGENI

SEQ ID NO: 2527 - protein, 16 aa, Artificial Sequence
  source: /note="Description of Artificial Sequence: Synthetic peptide"
  MOD_RES (11)..(11): Citrulline
  MOD_RES (13)..(13): Citrulline
FKAAAFAEKNXGXLIG

SEQ ID NO: 2528 - protein, 16 aa, Artificial Sequence
  source: /note="Description of Artificial Sequence: Synthetic peptide"
  MOD_RES (7)..(7): Citrulline
  MOD_RES (9)..(9): Citrulline
AFAEKNXGXLIGGLPD

SEQ ID NO: 2529 - protein, 16 aa, Artificial Sequence
  source: /note="Description of Artificial Sequence: Synthetic peptide"
  MOD_RES (6)..(6): Citrulline
NADLFXGTLEPVEKAL

SEQ ID NO: 2530 - protein, 16 aa, Artificial Sequence
  source: /note="Description of Artificial Sequence: Synthetic peptide"
  MOD_RES (8)..(8): Citrulline
TTVPSPPXGVISNVNE

SEQ ID NO: 2531 - protein, 16 aa, Artificial Sequence
  source: /note="Description of Artificial Sequence: Synthetic peptide"
  MOD_RES (12)..(12): Citrulline
LEDDPEAAYTTXGGKI

SEQ ID NO: 2532 - protein, 16 aa, Artificial Sequence
  source: /note="Description of Artificial Sequence: Synthetic peptide"
  MOD_RES (8)..(8): Citrulline
  MOD_RES (15)..(15): Citrulline
PEAAYTTXGGKIPIXW

SEQ ID NO: 2533 - protein, 16 aa, Artificial Sequence
  source: /note="Description of Artificial Sequence: Synthetic peptide"
  MOD_RES (14)..(14): Citrulline
AVYSDKLQHYSTGXGS

SEQ ID NO: 2534 - protein, 16 aa, Artificial Sequence
  source: /note="Description of Artificial Sequence: Synthetic peptide"
  MOD_RES (10)..(10): Citrulline
DKLQHYSTGXGSPGMK

SEQ ID NO: 2535 - protein, 16 aa, Artificial Sequence
  source: /note="Description of Artificial Sequence: Synthetic peptide"
  MOD_RES (6)..(6): Citrulline
HYSTGXGSPGMKIYID

SEQ ID NO: 2536 - protein, 16 aa, Artificial Sequence
  source: /note="Description of Artificial Sequence: Synthetic peptide"
  MOD_RES (6)..(6): Citrulline
  MOD_RES (13)..(13): Citrulline
AAYTTXGGKIPIXWTA

SEQ ID NO: 2537 - protein, 16 aa, Artificial Sequence
  source: /note="Description of Artificial Sequence: Synthetic peptide"
  MOD_RES (10)..(10): Citrulline
  MOD_RES (12)..(12): Citrulline
QTTPLIEYYXKXGIHS

SEQ ID NO: 2538 - protein, 16 aa, Artificial Sequence
  source: /note="Description of Artificial Sequence: Synthetic peptide"
  MOD_RES (6)..(6): Citrulline
  MOD_RES (8)..(8): Citrulline
LIEYYXKXGIHSAIDA

SEQ ID NO: 2539 - protein, 16 aa, Artificial Sequence
  source: /note="Description of Artificial Sequence: Synthetic peptide"
  MOD_RES (2)..(2): Citrulline
  MOD_RES (4)..(4): Citrulline
YXKXGIHSAIDASQTP

SEQ ID NO: 2540 - protein, 16 aa, Artificial Sequence
  source: /note="Description of Artificial Sequence: Synthetic peptide"
  MOD_RES (6)..(6): Citrulline
YDALLXGEIPDLNDIL

SEQ ID NO: 2541 - protein, 16 aa, Artificial Sequence
  source: /note="Description of Artificial Sequence: Synthetic peptide"
  MOD_RES (4)..(4): Citrulline
  MOD_RES (7)..(7): Citrulline
ALEXGLXGTHMENVYD

SEQ ID NO: 2542 - protein, 16 aa, Artificial Sequence
  source: /note="Description of Artificial Sequence: Synthetic peptide"
  MOD_RES (3)..(3): Citrulline
GLXGTHMENVYDFYKP

SEQ ID NO: 2543 - protein, 16 aa, Artificial Sequence
  source: /note="Description of Artificial Sequence: Synthetic peptide"
  MOD_RES (10)..(10): Citrulline
DKMIDLIIPXGSSQLV

SEQ ID NO: 2544 - protein, 16 aa, Artificial Sequence
  source: /note="Description of Artificial Sequence: Synthetic peptide"
  MOD_RES (6)..(6): Citrulline
  MOD_RES (13)..(13): Citrulline
DLIIPXGSSQLVXDIQ

SEQ ID NO: 2545 - protein, 16 aa, Artificial Sequence
  source: /note="Description of Artificial Sequence: Synthetic peptide"
  MOD_RES (4)..(4): Citrulline
  MOD_RES (12)..(12): Citrulline
MDAXLSAKMALXGKAL

SEQ ID NO: 2546 - protein, 16 aa, Artificial Sequence
  source: /note="Description of Artificial Sequence: Synthetic peptide"
  MOD_RES (5)..(5): Citrulline
  MOD_RES (8)..(8): Citrulline
MLNEXTWXGVQIPLPE

SEQ ID NO: 2547 - protein, 16 aa, Artificial Sequence
  source: /note="Description of Artificial Sequence: Synthetic peptide"
  MOD_RES (1)..(1): Citrulline
  MOD_RES (4)..(4): Citrulline
XTWXGVQIPLPEGINF

SEQ ID NO: 2548 - protein, 16 aa, Artificial Sequence
  source: /note="Description of Artificial Sequence: Synthetic peptide"
  MOD_RES (2)..(2): Citrulline
  MOD_RES (10)..(10): Citrulline
VXLLQAFLEXGSNTIA

SEQ ID NO: 2549 - protein, 16 aa, Artificial Sequence
  source: /note="Description of Artificial Sequence: Synthetic peptide"
  MOD_RES (6)..(6): Citrulline
QAFLEXGSNTIASAAA

SEQ ID NO: 2550 - protein, 16 aa, Artificial Sequence
  source: /note="Description of Artificial Sequence: Synthetic peptide"
  MOD_RES (6)..(6): Citrulline
APLNAXGNLAVNALNN

SEQ ID NO: 2551 - protein, 16 aa, Artificial Sequence
  source: /note="Description of Artificial Sequence: Synthetic peptide"
  MOD_RES (2)..(2): Citrulline
AXGNLAVNALNNNTTQ

SEQ ID NO: 2552 - protein, 16 aa, Artificial Sequence
  source: /note="Description of Artificial Sequence: Synthetic peptide"
  MOD_RES (8)..(8): Citrulline
  MOD_RES (10)..(10): Citrulline
KGQQLDGXSXGGKWLV

SEQ ID NO: 2553 - protein, 16 aa, Artificial Sequence
  source: /note="Description of Artificial Sequence: Synthetic peptide"
  MOD_RES (4)..(4): Citrulline
  MOD_RES (6)..(6): Citrulline
LDGXSXGGKWLVSDNF

SEQ ID NO: 2554 - protein, 16 aa, Artificial Sequence
  source: /note="Description of Artificial Sequence: Synthetic peptide"
  MOD_RES (8)..(8): Citrulline
TATQGLLXGAMALAPP

SEQ ID NO: 2555 - protein, 16 aa, Artificial Sequence
  source: /note="Description of Artificial Sequence: Synthetic peptide"
  MOD_RES (4)..(4): Citrulline
  MOD_RES (14)..(14): Citrulline
GLLXGAMALAPPPXGL

SEQ ID NO: 2556 - protein, 16 aa, Artificial Sequence
  source: /note="Description of Artificial Sequence: Synthetic peptide"
  MOD_RES (6)..(6): Citrulline
LAPPPXGLWQAKDISP

SEQ ID NO: 2557 - protein, 16 aa, Artificial Sequence
  source: /note="Description of Artificial Sequence: Synthetic peptide"
  MOD_RES (11)..(11): Citrulline
SQGSEEYETTXGQILQ

SEQ ID NO: 2558 - protein, 16 aa, Artificial Sequence
  source: /note="Description of Artificial Sequence: Synthetic peptide"
  MOD_RES (7)..(7): Citrulline
  MOD_RES (15)..(15): Citrulline
EEYETTXGQILQEYXK

SEQ ID NO: 2559 - protein, 16 aa, Artificial Sequence
  source: /note="Description of Artificial Sequence: Synthetic peptide"
  MOD_RES (5)..(5): Citrulline
  MOD_RES (12)..(12): Citrulline
SKQGXGKPSFSXGTFP

SEQ ID NO: 2560 - protein, 16 aa, Artificial Sequence
  source: /note="Description of Artificial Sequence: Synthetic peptide"
  MOD_RES (1)..(1): Citrulline
  MOD_RES (8)..(8): Citrulline
XGKPSFSXGTFPEDSS

SEQ ID NO: 2561 - protein, 16 aa, Artificial Sequence
  source: /note="Description of Artificial Sequence: Synthetic peptide"
  MOD_RES (4)..(4): Citrulline
SFSXGTFPEDSSEDTS

SEQ ID NO: 2562 - protein, 16 aa, Artificial Sequence
  source: /note="Description of Artificial Sequence: Synthetic peptide"
  MOD_RES (5)..(5): Citrulline
  MOD_RES (10)..(10): Citrulline
HSMVXKSLGXGAGWLS

SEQ ID NO: 2563 - protein, 16 aa, Artificial Sequence
  source: /note="Description of Artificial Sequence: Synthetic peptide"
  MOD_RES (1)..(1): Citrulline
  MOD_RES (6)..(6): Citrulline
XKSLGXGAGWLSEDED

SEQ ID NO: 2564 - protein, 16 aa, Artificial Sequence
  source: /note="Description of Artificial Sequence: Synthetic peptide"
  MOD_RES (6)..(7): Citrulline
LGPITXXGAQSPGVMN

SEQ ID NO: 2565 - protein, 16 aa, Artificial Sequence
  source: /note="Description of Artificial Sequence: Synthetic peptide"
  MOD_RES (2)..(3): Citrulline
TXXGAQSPGVMNGTPS

SEQ ID NO: 2566 - protein, 16 aa, Artificial Sequence
  source: /note="Description of Artificial Sequence: Synthetic peptide"
  MOD_RES (12)..(12): Citrulline
YDSIQIYGYEGXGSVA

SEQ ID NO: 2567 - protein, 16 aa, Artificial Sequence
  source: /note="Description of Artificial Sequence: Synthetic peptide"
  MOD_RES (8)..(8): Citrulline
QIYGYEGXGSVAGSLS

SEQ ID NO: 2568 - protein, 16 aa, Artificial Sequence
  source: /note="Description of Artificial Sequence: Synthetic peptide"
  MOD_RES (4)..(4): Citrulline
YEGXGSVAGSLSSLES

SEQ ID NO: 2569 - protein, 16 aa, Artificial Sequence
  source: /note="Description of Artificial Sequence: Synthetic peptide"
  MOD_RES (12)..(12): Citrulline
PPPPAPQPPQTXGAPA

SEQ ID NO: 2570 - protein, 16 aa, Artificial Sequence
  source: /note="Description of Artificial Sequence: Synthetic peptide"
  MOD_RES (8)..(8): Citrulline
APQPPQTXGAPAADDD

SEQ ID NO: 2571 - protein, 16 aa, Artificial Sequence
  source: /note="Description of Artificial Sequence: Synthetic peptide"
  MOD_RES (4)..(4): Citrulline
PQTXGAPAADDDKGPQ

SEQ ID NO: 2572 - protein, 16 aa, Artificial Sequence
  source: /note="Description of Artificial Sequence: Synthetic peptide"
  MOD_RES (4)..(4): Citrulline
  MOD_RES (9)..(9): Citrulline
TIAXEEGFXGLWKGTS

SEQ ID NO: 2573 - protein, 16 aa, Artificial Sequence
  source: /note="Description of Artificial Sequence: Synthetic peptide"
  MOD_RES (5)..(5): Citrulline
EEGFXGLWKGTSPNVA

SEQ ID NO: 2574 - protein, 16 aa, Artificial Sequence
  source: /note="Description of Artificial Sequence: Synthetic peptide"
  MOD_RES (6)..(6): Citrulline
KFSKSXGVGVFGDMAQ

SEQ ID NO: 2575 - protein, 16 aa, Artificial Sequence
  source: /note="Description of Artificial Sequence: Synthetic peptide"
  MOD_RES (10)..(10): Citrulline
GDVYKCPVGXGESLPC

SEQ ID NO: 2576 - protein, 16 aa, Artificial Sequence
  source: /note="Description of Artificial Sequence: Synthetic peptide"
  MOD_RES (6)..(6): Citrulline
KCPVGXGESLPCVKLD

SEQ ID NO: 2577 - protein, 16 aa, Artificial Sequence
  source: /note="Description of Artificial Sequence: Synthetic peptide"
  MOD_RES (2)..(2): Citrulline
GXGESLPCVKLDLPVN

SEQ ID NO: 2578 - protein, 16 aa, Artificial Sequence
  source: /note="Description of Artificial Sequence: Synthetic peptide"
  MOD_RES (8)..(8): Citrulline
TSTDHLKXGTILDCNT

SEQ ID NO: 2579 - protein, 16 aa, Artificial Sequence
  source: /note="Description of Artificial Sequence: Synthetic peptide"
  MOD_RES (4)..(4): Citrulline
HLKXGTILDCNTCKFA

SEQ ID NO: 2580 - protein, 16 aa, Artificial Sequence
  source: /note="Description of Artificial Sequence: Synthetic peptide"
  MOD_RES (6)..(6): Citrulline
  MOD_RES (10)..(10): Citrulline
LNLTIXGELXSENASL

SEQ ID NO: 2581 - protein, 16 aa, Artificial Sequence
  source: /note="Description of Artificial Sequence: Synthetic peptide"
  MOD_RES (5)..(5): Citrulline
  MOD_RES (10)..(10): Citrulline
AFKLXGLLLXGEAIKY

SEQ ID NO: 2582 - protein, 16 aa, Artificial Sequence
  source: /note="Description of Artificial Sequence: Synthetic peptide"
  MOD_RES (1)..(1): Citrulline
  MOD_RES (6)..(6): Citrulline
XGLLLXGEAIKYLTEA

SEQ ID NO: 2583 - protein, 16 aa, Artificial Sequence
  source: /note="Description of Artificial Sequence: Synthetic peptide"
  MOD_RES (8)..(8): Citrulline
AFLVNAAXGGLVDEKA

SEQ ID NO: 2584 - protein, 16 aa, Artificial Sequence
  source: /note="Description of Artificial Sequence: Synthetic peptide"
  MOD_RES (5)..(5): Citrulline
  MOD_RES (7)..(7): Citrulline
LKEGXIXGAALDVHES

SEQ ID NO: 2585 - protein, 16 aa, Artificial Sequence
  source: /note="Description of Artificial Sequence: Synthetic peptide"
  MOD_RES (1)..(1): Citrulline
  MOD_RES (3)..(3): Citrulline
XIXGAALDVHESEPFS

SEQ ID NO: 2586 - protein, 16 aa, Artificial Sequence
  source: /note="Description of Artificial Sequence: Synthetic peptide"
  MOD_RES (8)..(9): Citrulline
LEVMDSVXXGAQLAIE

SEQ ID NO: 2587 - protein, 16 aa, Artificial Sequence
  source: /note="Description of Artificial Sequence: Synthetic peptide"
  MOD_RES (4)..(5): Citrulline
DSVXXGAQLAIEECQY

SEQ ID NO: 2588 - protein, 16 aa, Artificial Sequence
  source: /note="Description of Artificial Sequence: Synthetic peptide"
  MOD_RES (7)..(7): Citrulline
YDVPPVXGLLPSQYGQ

SEQ ID NO: 2589 - protein, 16 aa, Artificial Sequence
  source: /note="Description of Artificial Sequence: Synthetic peptide"
  MOD_RES (3)..(3): Citrulline
PVXGLLPSQYGQEVYD

SEQ ID NO: 2590 - protein, 16 aa, Artificial Sequence
  source: /note="Description of Artificial Sequence: Synthetic peptide"
  MOD_RES (12)..(12): Citrulline
  MOD_RES (14)..(14): Citrulline
QPLGSPNCVKSXGXFP

SEQ ID NO: 2591 - protein, 16 aa, Artificial Sequence
  source: /note="Description of Artificial Sequence: Synthetic peptide"
  MOD_RES (8)..(8): Citrulline
  MOD_RES (10)..(10): Citrulline
SPNCVKSXGXFPMMGI

SEQ ID NO: 2592 - protein, 16 aa, Artificial Sequence
  source: /note="Description of Artificial Sequence: Synthetic peptide"
  MOD_RES (4)..(4): Citrulline
  MOD_RES (6)..(6): Citrulline
VKSXGXFPMMGIGQML

SEQ ID NO: 2593 - protein, 16 aa, Artificial Sequence
  source: /note="Description of Artificial Sequence: Synthetic peptide"
  MOD_RES (13)..(13): Citrulline
EQPSPGHYGDQPXGSP

SEQ ID NO: 2594 - protein, 16 aa, Artificial Sequence
  source: /note="Description of Artificial Sequence: Synthetic peptide"
  MOD_RES (9)..(9): Citrulline
PGHYGDQPXGSPDYGS

SEQ ID NO: 2595 - protein, 16 aa, Artificial Sequence
  source: /note="Description of Artificial Sequence: Synthetic peptide"
  MOD_RES (12)..(12): Citrulline
GVSSVDSAFSSXGSLS

SEQ ID NO: 2596 - protein, 16 aa, Artificial Sequence
  source: /note="Description of Artificial Sequence: Synthetic peptide"
  MOD_RES (8)..(8): Citrulline
VDSAFSSXGSLSLSFE

SEQ ID NO: 2597 - protein, 16 aa, Artificial Sequence
  source: /note="Description of Artificial Sequence: Synthetic peptide"
  MOD_RES (9)..(9): Citrulline
TGGLVDLAXGQLLPVS

SEQ ID NO: 2598 - protein, 16 aa, Artificial Sequence
  source: /note="Description of Artificial Sequence: Synthetic peptide"
  MOD_RES (5)..(5): Citrulline
VDLAXGQLLPVSKALQ

SEQ ID NO: 2599 - protein, 16 aa, Artificial Sequence
  source: /note="Description of Artificial Sequence: Synthetic peptide"
  MOD_RES (1)..(1): Citrulline
XGQLLPVSKALQQGLV

SEQ ID NO: 2600 - protein, 16 aa, Artificial Sequence
  source: /note="Description of Artificial Sequence: Synthetic peptide"
  MOD_RES (10)..(10): Citrulline
  MOD_RES (12)..(12): Citrulline
AEQVEITVGXFXGQKP

SEQ ID NO: 2601 - protein, 16 aa, Artificial Sequence
  source: /note="Description of Artificial Sequence: Synthetic peptide"
  MOD_RES (6)..(6): Citrulline
  MOD_RES (8)..(8): Citrulline
EITVGXFXGQKPTLWA

SEQ ID NO: 2602 - protein, 16 aa, Artificial Sequence
  source: /note="Description of Artificial Sequence: Synthetic peptide"
  MOD_RES (2)..(2): Citrulline
  MOD_RES (4)..(4): Citrulline
GXFXGQKPTLWALLNS

SEQ ID NO: 2603 - protein, 16 aa, Artificial Sequence
  source: /note="Description of Artificial Sequence: Synthetic peptide"
  MOD_RES (10)..(10): Citrulline
GLYMLQLAGXGSAVHQ

SEQ ID NO: 2604 - protein, 16 aa, Artificial Sequence
  source: /note="Description of Artificial Sequence: Synthetic peptide"
  MOD_RES (6)..(6): Citrulline
LQLAGXGSAVHQLSEE

SEQ ID NO: 2605 - protein, 16 aa, Artificial Sequence
  source: /note="Description of Artificial Sequence: Synthetic peptide"
  MOD_RES (11)..(12): Citrulline
TTTTLATSTAXXGKPP

SEQ ID NO: 2606 - protein, 16 aa, Artificial Sequence
  source: /note="Description of Artificial Sequence: Synthetic peptide"
  MOD_RES (7)..(8): Citrulline
LATSTAXXGKPPTKEP

SEQ ID NO: 2607 - protein, 16 aa, Artificial Sequence
  source: /note="Description of Artificial Sequence: Synthetic peptide"
  MOD_RES (3)..(4): Citrulline
TAXXGKPPTKEPISQT

SEQ ID NO: 2608 - protein, 16 aa, Artificial Sequence
  source: /note="Description of Artificial Sequence: Synthetic peptide"
  MOD_RES (2)..(2): Citrulline
  MOD_RES (11)..(11): Citrulline
SXAQAWSGPSXGALGS

SEQ ID NO: 2609 - protein, 16 aa, Artificial Sequence
  source: /note="Description of Artificial Sequence: Synthetic peptide"
  MOD_RES (7)..(7): Citrulline
AWSGPSXGALGSALPP

SEQ ID NO: 2610 - protein, 16 aa, Artificial Sequence
  source: /note="Description of Artificial Sequence: Synthetic peptide"
  MOD_RES (3)..(3): Citrulline
PSXGALGSALPPELPP

SEQ ID NO: 2611 - protein, 16 aa, Artificial Sequence
  source: /note="Description of Artificial Sequence: Synthetic peptide"
  MOD_RES (11)..(11): Citrulline
TQGMLEQYLNXGGQKS

SEQ ID NO: 2612 - protein, 16 aa, Artificial Sequence
  source: /note="Description of Artificial Sequence: Synthetic peptide"
  MOD_RES (7)..(7): Citrulline
LEQYLNXGGQKSHGLC

SEQ ID NO: 2613 - protein, 16 aa, Artificial Sequence
  source: /note="Description of Artificial Sequence: Synthetic peptide"
  MOD_RES (3)..(3): Citrulline
  MOD_RES (8)..(8): Citrulline
DLXHCFYXGQVNSQED

SEQ ID NO: 2614 - protein, 16 aa, Artificial Sequence
  source: /note="Description of Artificial Sequence: Synthetic peptide"
  MOD_RES (4)..(4): Citrulline
CFYXGQVNSQEDYKAV

SEQ ID NO: 2615 - protein, 16 aa, Artificial Sequence
  source: /note="Description of Artificial Sequence: Synthetic peptide"
  MOD_RES (13)..(13): Citrulline
GFITAIYGAEWAXGKT

SEQ ID NO: 2616 - protein, 16 aa, Artificial Sequence
  source: /note="Description of Artificial Sequence: Synthetic peptide"
  MOD_RES (9)..(9): Citrulline
AIYGAEWAXGKTLPTG

SEQ ID NO: 2617 - protein, 16 aa, Artificial Sequence
  source: /note="Description of Artificial Sequence: Synthetic peptide"
  MOD_RES (5)..(5): Citrulline
  MOD_RES (14)..(14): Citrulline
AEWAXGKTLPTGDXIM

SEQ ID NO: 2618 - protein, 16 aa, Artificial Sequence
  source: /note="Description of Artificial Sequence: Synthetic peptide"
  MOD_RES (9)..(9): Citrulline
  MOD_RES (11)..(11): Citrulline
EKKNIAAQXIXGSSAD

SEQ ID NO: 2619 - protein, 16 aa, Artificial Sequence
  source: /note="Description of Artificial Sequence: Synthetic peptide"
  MOD_RES (5)..(5): Citrulline
  MOD_RES (7)..(7): Citrulline
IAAQXIXGSSADSLVT

SEQ ID NO: 2620 - protein, 16 aa, Artificial Sequence
  source: /note="Description of Artificial Sequence: Synthetic peptide"
  MOD_RES (2)..(2): Citrulline
  MOD_RES (9)..(9): Citrulline
GXLVHSKKXGDGFVNE

SEQ ID NO: 2621 - protein, 16 aa, Artificial Sequence
  source: /note="Description of Artificial Sequence: Synthetic peptide"
  MOD_RES (5)..(5): Citrulline
  MOD_RES (14)..(14): Citrulline
HSKKXGDGFVNESXLQ

SEQ ID NO: 2622 - protein, 16 aa, Artificial Sequence
  source: /note="Description of Artificial Sequence: Synthetic peptide"
  MOD_RES (13)..(13): Citrulline
LQNVLGSVTAVNXGLL

SEQ ID NO: 2623 - protein, 16 aa, Artificial Sequence
  source: /note="Description of Artificial Sequence: Synthetic peptide"
  MOD_RES (9)..(9): Citrulline
LGSVTAVNXGLLGSGG

SEQ ID NO: 2624 - protein, 16 aa, Artificial Sequence
  source: /note="Description of Artificial Sequence: Synthetic peptide"
  MOD_RES (5)..(5): Citrulline
TAVNXGLLGSGGLLGG

SEQ ID NO: 2625 - protein, 16 aa, Artificial Sequence
  source: /note="Description of Artificial Sequence: Synthetic peptide"
  MOD_RES (12)..(12): Citrulline
  MOD_RES (15)..(15): Citrulline
LSATVTGGQKGXGSXG

SEQ ID NO: 2626 - protein, 16 aa, Artificial Sequence
  source: /note="Description of Artificial Sequence: Synthetic peptide"
  MOD_RES (8)..(8): Citrulline
  MOD_RES (11)..(11): Citrulline
VTGGQKGXGSXGQHQA

SEQ ID NO: 2627 - protein, 16 aa, Artificial Sequence
  source: /note="Description of Artificial Sequence: Synthetic peptide"
  MOD_RES (4)..(4): Citrulline
  MOD_RES (7)..(7): Citrulline
QKGXGSXGQHQAHSLE

SEQ ID NO: 2628 - protein, 16 aa, Artificial Sequence
  source: /note="Description of Artificial Sequence: Synthetic peptide"
  MOD_RES (10)..(10): Citrulline
  MOD_RES (13)..(13): Citrulline
QVVWALIASXGQXLET

SEQ ID NO: 2629 - protein, 16 aa, Artificial Sequence
  source: /note="Description of Artificial Sequence: Synthetic peptide"
  MOD_RES (6)..(6): Citrulline
  MOD_RES (9)..(9): Citrulline
ALIASXGQXLETQEIE

SEQ ID NO: 2630 - protein, 16 aa, Artificial Sequence
  source: /note="Description of Artificial Sequence: Synthetic peptide"
  MOD_RES (6)..(6): Citrulline
APQETXGIPSKKPVAD

SEQ ID NO: 2631 - protein, 15 aa, Artificial Sequence
  source: /note="Description of Artificial Sequence: Synthetic peptide"
  MOD_RES (2)..(2): Citrulline
TXGIPSKKPVADYFL

SEQ ID NO: 2632 - protein, 16 aa, Artificial Sequence
  source: /note="Description of Artificial Sequence: Synthetic peptide"
  MOD_RES (5)..(5): Citrulline
  MOD_RES (11)..(11): Citrulline
VNDKXQVSKEXGEKLA

SEQ ID NO: 2633 - protein, 16 aa, Artificial Sequence
  source: /note="Description of Artificial Sequence: Synthetic peptide"
  MOD_RES (1)..(1): Citrulline
  MOD_RES (7)..(7): Citrulline
XQVSKEXGEKLALDYG

SEQ ID NO: 2634 - protein, 16 aa, Artificial Sequence
  source: /note="Description of Artificial Sequence: Synthetic peptide"
  MOD_RES (3)..(3): Citrulline
KEXGEKLALDYGIKFM

SEQ ID NO: 2635 - protein, 16 aa, Artificial Sequence
  source: /note="Description of Artificial Sequence: Synthetic peptide"
  MOD_RES (8)..(8): Citrulline
  MOD_RES (12)..(12): Citrulline
LELDHQKXGGAXYTAL

SEQ ID NO: 2636 - protein, 16 aa, Artificial Sequence
  source: /note="Description of Artificial Sequence: Synthetic peptide"
  MOD_RES (4)..(4): Citrulline
  MOD_RES (8)..(8): Citrulline
HQKXGGAXYTALDKWT

SEQ ID NO: 2637 - protein, 16 aa, Artificial Sequence
  source: /note="Description of Artificial Sequence: Synthetic peptide"
  MOD_RES (2)..(2): Citrulline
  MOD_RES (11)..(11): Citrulline
IXKDDEVQVVXGHYKG

SEQ ID NO: 2638 - protein, 16 aa, Artificial Sequence
  source: /note="Description of Artificial Sequence: Synthetic peptide"
  MOD_RES (7)..(7): Citrulline
DEVQVVXGHYKGQQIG

SEQ ID NO: 2639 - protein, 16 aa, Artificial Sequence
  source: /note="Description of Artificial Sequence: Synthetic peptide"
  MOD_RES (13)..(13): Citrulline
GGSGYDYSYAGGXGSY

SEQ ID NO: 2640 - protein, 16 aa, Artificial Sequence
  source: /note="Description of Artificial Sequence: Synthetic peptide"
  MOD_RES (9)..(9): Citrulline
YDYSYAGGXGSYGDLG

SEQ ID NO: 2641 - protein, 16 aa, Artificial Sequence
  source: /note="Description of Artificial Sequence: Synthetic peptide"
  MOD_RES (6)..(6): Citrulline
DGFDSXGDVKVIMATN

SEQ ID NO: 2642 - protein, 16 aa, Artificial Sequence
  source: /note="Description of Artificial Sequence: Synthetic peptide"
  MOD_RES (13)..(13): Citrulline
  MOD_RES (15)..(15): Citrulline
DKKCPFTGNVSIXGXI

SEQ ID NO: 2643 - protein, 16 aa, Artificial Sequence
  source: /note="Description of Artificial Sequence: Synthetic peptide"
  MOD_RES (9)..(9): Citrulline
  MOD_RES (11)..(11): Citrulline
PFTGNVSIXGXILSGV

SEQ ID NO: 2644 - protein, 16 aa, Artificial Sequence
  source: /note="Description of Artificial Sequence: Synthetic peptide"
  MOD_RES (5)..(5): Citrulline
  MOD_RES (7)..(7): Citrulline
NVSIXGXILSGVVTKM

SEQ ID NO: 2645 - protein, 16 aa, Artificial Sequence
  source: /note="Description of Artificial Sequence: Synthetic peptide"
  MOD_RES (13)..(13): Citrulline
IVTCETNTGEVYXGKL

SEQ ID NO: 2646 - protein, 16 aa, Artificial Sequence
  source: /note="Description of Artificial Sequence: Synthetic peptide"
  MOD_RES (9)..(9): Citrulline
ETNTGEVYXGKLIEAE

SEQ ID NO: 2647 - protein, 16 aa, Artificial Sequence
  source: /note="Description of Artificial Sequence: Synthetic peptide"
  MOD_RES (5)..(5): Citrulline
GEVYXGKLIEAEDNMN

SEQ ID NO: 2648 - protein, 16 aa, Artificial Sequence
  source: /note="Description of Artificial Sequence: Synthetic peptide"
  MOD_RES (10)..(10): Citrulline
FICALSITSXGSFEQK

SEQ ID NO: 2649 - protein, 16 aa, Artificial Sequence
  source: /note="Description of Artificial Sequence: Synthetic peptide"
  MOD_RES (6)..(6): Citrulline
LSITSXGSFEQKLNWA

SEQ ID NO: 2650 - protein, 16 aa, Artificial Sequence
  source: /note="Description of Artificial Sequence: Synthetic peptide"
  MOD_RES (10)..(10): Citrulline
VKDIIHDPGXGAPLAK

SEQ ID NO: 2651 - protein, 16 aa, Artificial Sequence
  source: /note="Description of Artificial Sequence: Synthetic peptide"
  MOD_RES (6)..(6): Citrulline
  MOD_RES (11)..(11): Citrulline
SPGDGXTFPKXGQTCV

SEQ ID NO: 2652 - protein, 16 aa, Artificial Sequence
  source: /note="Description of Artificial Sequence: Synthetic peptide"
  MOD_RES (13)..(13): Citrulline
FKATADDELSFKXGDI

SEQ ID NO: 2653 - protein, 16 aa, Artificial Sequence
  source: /note="Description of Artificial Sequence: Synthetic peptide"
  MOD_RES (9)..(9): Citrulline
ADDELSFKXGDILKVL

SEQ ID NO: 2654 - protein, 16 aa, Artificial Sequence
  source: /note="Description of Artificial Sequence: Synthetic peptide"
  MOD_RES (5)..(5): Citrulline
LSFKXGDILKVLNEEC

SEQ ID NO: 2655 - protein, 16 aa, Artificial Sequence
  source: /note="Description of Artificial Sequence: Synthetic peptide"
  MOD_RES (6)..(7): Citrulline
GELGFXXGDFIHVMDN

SEQ ID NO: 2656 - protein, 16 aa, Artificial Sequence
  source: /note="Description of Artificial Sequence: Synthetic peptide"
  MOD_RES (2)..(3): Citrulline
FXXGDFIHVMDNSDPN

SEQ ID NO: 2657 - protein, 16 aa, Artificial Sequence
  source: /note="Description of Artificial Sequence: Synthetic peptide"
  MOD_RES (7)..(7): Citrulline
PSESKPXGTSHLPAGQ

SEQ ID NO: 2658 - protein, 16 aa, Artificial Sequence
  source: /note="Description of Artificial Sequence: Synthetic peptide"
  MOD_RES (12)..(12): Citrulline
IAGAPTQYPPGXGTPP

SEQ ID NO: 2659 - protein, 16 aa, Artificial Sequence
  source: /note="Description of Artificial Sequence: Synthetic peptide"
  MOD_RES (8)..(8): Citrulline
PTQYPPGXGTPPPPVG

SEQ ID NO: 2660 - protein, 16 aa, Artificial Sequence
  source: /note="Description of Artificial Sequence: Synthetic peptide"
  MOD_RES (9)..(9): Citrulline
PPIGLPPAXGTPIGMP

SEQ ID NO: 2661 - protein, 16 aa, Artificial Sequence
  source: /note="Description of Artificial Sequence: Synthetic peptide"
  MOD_RES (5)..(5): Citrulline
LPPAXGTPIGMPPPGM

SEQ ID NO: 2662 - protein, 16 aa, Artificial Sequence
  source: /note="Description of Artificial Sequence: Synthetic peptide"
  MOD_RES (9)..(9): Citrulline
ASGAPAGAXGGPAKAN

SEQ ID NO: 2663 - protein, 16 aa, Artificial Sequence
  source: /note="Description of Artificial Sequence: Synthetic peptide"
  MOD_RES (5)..(5): Citrulline
PAGAXGGPAKANSNPF

SEQ ID NO: 2664 - protein, 16 aa, Artificial Sequence
  source: /note="Description of Artificial Sequence: Synthetic peptide"
  MOD_RES (9)..(9): Citrulline
  MOD_RES (11)..(11): Citrulline
GSNVPFKPXGXEFSFE

SEQ ID NO: 2665 - protein, 16 aa, Artificial Sequence
  source: /note="Description of Artificial Sequence: Synthetic peptide"
  MOD_RES (5)..(5): Citrulline
  MOD_RES (7)..(7): Citrulline
PFKPXGXEFSFEAWNA

SEQ ID NO: 2666 - protein, 16 aa, Artificial Sequence
  source: /note="Description of Artificial Sequence: Synthetic peptide"
  MOD_RES (1)..(1): Citrulline
  MOD_RES (3)..(3): Citrulline
XGXEFSFEAWNAKITD

SEQ ID NO: 2667 - protein, 16 aa, Artificial Sequence
  source: /note="Description of Artificial Sequence: Synthetic peptide"
  MOD_RES (13)..(13): Citrulline
EYCGKYAPAEQFXGSK

SEQ ID NO: 2668 - protein, 16 aa, Artificial Sequence
  source: /note="Description of Artificial Sequence: Synthetic peptide"
  MOD_RES (9)..(9): Citrulline
  MOD_RES (13)..(13): Citrulline
KYAPAEQFXGSKXFCS

SEQ ID NO: 2669 - protein, 16 aa, Artificial Sequence
  source: /note="Description of Artificial Sequence: Synthetic peptide"
  MOD_RES (5)..(5): Citrulline
  MOD_RES (9)..(9): Citrulline
AEQFXGSKXFCSMTCA

SEQ ID NO: 2670 - protein, 16 aa, Artificial Sequence
  source: /note="Description of Artificial Sequence: Synthetic peptide"
  MOD_RES (1)..(1): Citrulline
  MOD_RES (10)..(10): Citrulline
XTEDDGVGPXGAHVSA

SEQ ID NO: 2671 - protein, 16 aa, Artificial Sequence
  source: /note="Description of Artificial Sequence: Synthetic peptide"
  MOD_RES (6)..(6): Citrulline
DGVGPXGAHVSALCSG

SEQ ID NO: 2672 - protein, 16 aa, Artificial Sequence
  source: /note="Description of Artificial Sequence: Synthetic peptide"
  MOD_RES (9)..(9): Citrulline
  MOD_RES (11)..(11): Citrulline
SPLMPHLFXVXGAVSQ

SEQ ID NO: 2673 - protein, 16 aa, Artificial Sequence
  source: /note="Description of Artificial Sequence: Synthetic peptide"
  MOD_RES (5)..(5): Citrulline
  MOD_RES (7)..(7): Citrulline
PHLFXVXGAVSQTYPS

SEQ ID NO: 2674 - protein, 16 aa, Artificial Sequence
  source: /note="Description of Artificial Sequence: Synthetic peptide"
  MOD_RES (1)..(1): Citrulline
  MOD_RES (3)..(3): Citrulline
XVXGAVSQTYPSGTCA

SEQ ID NO: 2675 - protein, 16 aa, Artificial Sequence
  source: /note="Description of Artificial Sequence: Synthetic peptide"
  MOD_RES (12)..(12): Citrulline
TYPSGTCAYIQXGAVY

SEQ ID NO: 2676 - protein, 16 aa, Artificial Sequence
  source: /note="Description of Artificial Sequence: Synthetic peptide"
  MOD_RES (8)..(8): Citrulline
GTCAYIQXGAVYAENC

SEQ ID NO: 2677 - protein, 16 aa, Artificial Sequence
  source: /note="Description of Artificial Sequence: Synthetic peptide"
  MOD_RES (6)..(6): Citrulline
LYSLPXGAAKAIASAS

SEQ ID NO: 2678 - protein, 16 aa, Artificial Sequence
  source: /note="Description of Artificial Sequence: Synthetic peptide"
  MOD_RES (2)..(2): Citrulline
PXGAAKAIASASASAS

SEQ ID NO: 2679 - protein, 16 aa, Artificial Sequence
  source: /note="Description of Artificial Sequence: Synthetic peptide"
  MOD_RES (5)..(5): Citrulline
LSSHXGDLITEPFLPK

SEQ ID NO: 2680 - protein, 16 aa, Artificial Sequence
  source: /note="Description of Artificial Sequence: Synthetic peptide"
  MOD_RES (13)..(13): Citrulline
YFYYGILQEKITXGKY

SEQ ID NO: 2681 - protein, 16 aa, Artificial Sequence
  source: /note="Description of Artificial Sequence: Synthetic peptide"
  MOD_RES (9)..(9): Citrulline
GILQEKITXGKYGEGA

SEQ ID NO: 2682 - protein, 16 aa, Artificial Sequence
  source: /note="Description of Artificial Sequence: Synthetic peptide"
  MOD_RES (5)..(5): Citrulline
EKITXGKYGEGAKQET

SEQ ID NO: 2683 - protein, 16 aa, Artificial Sequence
  source: /note="Description of Artificial Sequence: Synthetic peptide"
  MOD_RES (6)..(6): Citrulline
  MOD_RES (14)..(14): Citrulline
QEELKXKKIQYLTXGE

SEQ ID NO: 2684 - protein, 16 aa, Artificial Sequence
  source: /note="Description of Artificial Sequence: Synthetic peptide"
  MOD_RES (2)..(2): Citrulline
  MOD_RES (10)..(10): Citrulline
KXKKIQYLTXGEESSS

SEQ ID NO: 2685 - protein, 16 aa, Artificial Sequence
  source: /note="Description of Artificial Sequence: Synthetic peptide"
  MOD_RES (6)..(6): Citrulline
IQYLTXGEESSSDTNK

SEQ ID NO: 2686 - protein, 16 aa, Artificial Sequence
  source: /note="Description of Artificial Sequence: Synthetic peptide"
  MOD_RES (11)..(11): Citrulline
MSFPHFGHPYXGASQF

SEQ ID NO: 2687 - protein, 16 aa, Artificial Sequence
  source: /note="Description of Artificial Sequence: Synthetic peptide"
  MOD_RES (7)..(7): Citrulline
HFGHPYXGASQFLASA

SEQ ID NO: 2688 - protein, 16 aa, Artificial Sequence
  source: /note="Description of Artificial Sequence: Synthetic peptide"
  MOD_RES (12)..(12): Citrulline
GCVNFMATATHXGQVI

SEQ ID NO: 2689 - protein, 16 aa, Artificial Sequence
  source: /note="Description of Artificial Sequence: Synthetic peptide"
  MOD_RES (8)..(8): Citrulline
FMATATHXGQVIFKDA

SEQ ID NO: 2690 - protein, 16 aa, Artificial Sequence
  source: /note="Description of Artificial Sequence: Synthetic peptide"
  MOD_RES (4)..(4): Citrulline
ATHXGQVIFKDALAQQ

SEQ ID NO: 2691 - protein, 16 aa, Artificial Sequence
  source: /note="Description of Artificial Sequence: Synthetic peptide"
  MOD_RES (5)..(5): Citrulline
  MOD_RES (15)..(15): Citrulline
DLDLXGAKFLQYWGXI

SEQ ID NO: 2692 - protein, 16 aa, Artificial Sequence
  source: /note="Description of Artificial Sequence: Synthetic peptide"
  MOD_RES (1)..(1): Citrulline
  MOD_RES (11)..(11): Citrulline
XGAKFLQYWGXIGSEN

SEQ ID NO: 2693 - protein, 16 aa, Artificial Sequence
  source: /note="Description of Artificial Sequence: Synthetic peptide"
  MOD_RES (14)..(14): Citrulline
SSITHGAGGTKAPXGT

SEQ ID NO: 2694 - protein, 16 aa, Artificial Sequence
  source: /note="Description of Artificial Sequence: Synthetic peptide"
  MOD_RES (10)..(10): Citrulline
  MOD_RES (15)..(15): Citrulline
HGAGGTKAPXGTLSXS

SEQ ID NO: 2695 - protein, 16 aa, Artificial Sequence
  source: /note="Description of Artificial Sequence: Synthetic peptide"
  MOD_RES (6)..(6): Citrulline
  MOD_RES (11)..(11): Citrulline
GTKAPXGTLSXSQSVS

SEQ ID NO: 2696 - protein, 16 aa, Artificial Sequence
  source: /note="Description of Artificial Sequence: Synthetic peptide"
  MOD_RES (12)..(12): Citrulline
STPFPGPAAGPXGVLL

SEQ ID NO: 2697 - protein, 16 aa, Artificial Sequence
  source: /note="Description of Artificial Sequence: Synthetic peptide"
  MOD_RES (8)..(8): Citrulline
  MOD_RES (14)..(14): Citrulline
PGPAAGPXGVLLTXTG

SEQ ID NO: 2698 - protein, 16 aa, Artificial Sequence
  source: /note="Description of Artificial Sequence: Synthetic peptide"
  MOD_RES (12)..(12): Citrulline
NELEIPGQYDGXGKPL

SEQ ID NO: 2699 - protein, 16 aa, Artificial Sequence
  source: /note="Description of Artificial Sequence: Synthetic peptide"
  MOD_RES (8)..(8): Citrulline
IPGQYDGXGKPLPEYH

SEQ ID NO: 2700 - protein, 16 aa, Artificial Sequence
  source: /note="Description of Artificial Sequence: Synthetic peptide"
  MOD_RES (3)..(3): Citrulline
  MOD_RES (10)..(10): Citrulline
AFXDYVAVAXGSKDHN

SEQ ID NO: 2701 - protein, 16 aa, Artificial Sequence
  source: /note="Description of Artificial Sequence: Synthetic peptide"
  MOD_RES (6)..(6): Citrulline
  MOD_RES (14)..(14): Citrulline
YVAVAXGSKDHNIXAQ

SEQ ID NO: 2702 - protein, 16 aa, Artificial Sequence
  source: /note="Description of Artificial Sequence: Synthetic peptide"
  MOD_RES (12)..(12): Citrulline
PFPGPGHGGPTXGSFH

SEQ ID NO: 2703 - protein, 16 aa, Artificial Sequence
  source: /note="Description of Artificial Sequence: Synthetic peptide"
  MOD_RES (8)..(8): Citrulline
  MOD_RES (16)..(16): Citrulline
PGHGGPTXGSFHKEQX

SEQ ID NO: 2704 - protein, 16 aa, Artificial Sequence
  source: /note="Description of Artificial Sequence: Synthetic peptide"
  MOD_RES (7)..(7): Citrulline
  MOD_RES (11)..(11): Citrulline
LTQGLFXGLSXQETHQ

SEQ ID NO: 2705 - protein, 16 aa, Artificial Sequence
  source: /note="Description of Artificial Sequence: Synthetic peptide"
  MOD_RES (3)..(3): Citrulline
  MOD_RES (7)..(7): Citrulline
LFXGLSXQETHQQLAD

SEQ ID NO: 2706 - protein, 16 aa, Artificial Sequence
  source: /note="Description of Artificial Sequence: Synthetic peptide"
  MOD_RES (8)..(8): Citrulline
  MOD_RES (11)..(11): Citrulline
AGDGSTCXLVXGQSKS

SEQ ID NO: 2707 - protein, 16 aa, Artificial Sequence
  source: /note="Description of Artificial Sequence: Synthetic peptide"
  MOD_RES (4)..(4): Citrulline
  MOD_RES (7)..(7): Citrulline
STCXLVXGQSKSHVSP

SEQ ID NO: 2708 - protein, 16 aa, Artificial Sequence
  source: /note="Description of Artificial Sequence: Synthetic peptide"
  MOD_RES (12)..(12): Citrulline
GVPQPNITWLKXGGSL

SEQ ID NO: 2709 - protein, 16 aa, Artificial Sequence
  source: /note="Description of Artificial Sequence: Synthetic peptide"
  MOD_RES (10)..(10): Citrulline
  MOD_RES (12)..(12): Citrulline
FIIALSVTSXGXLEQK

SEQ ID NO: 2710 - protein, 16 aa, Artificial Sequence
  source: /note="Description of Artificial Sequence: Synthetic peptide"
  MOD_RES (6)..(6): Citrulline
  MOD_RES (8)..(8): Citrulline
LSVTSXGXLEQKLMWA

SEQ ID NO: 2711 - protein, 16 aa, Artificial Sequence
  source: /note="Description of Artificial Sequence: Synthetic peptide"
  MOD_RES (12)..(13): Citrulline
KNGVFVDGAFQXXGAP

SEQ ID NO: 2712 - protein, 16 aa, Artificial Sequence
  source: /note="Description of Artificial Sequence: Synthetic peptide"
  MOD_RES (8)..(9): Citrulline
FVDGAFQXXGAPALQL

SEQ ID NO: 2713 - protein, 16 aa, Artificial Sequence
  source: /note="Description of Artificial Sequence: Synthetic peptide"
  MOD_RES (4)..(5): Citrulline
AFQXXGAPALQLPKQC

SEQ ID NO: 2714 - protein, 16 aa, Artificial Sequence
  source: /note="Description of Artificial Sequence: Synthetic peptide"
  MOD_RES (9)..(9): Citrulline
  MOD_RES (11)..(11): Citrulline
EGIFIDFGXGXGSGMS

SEQ ID NO: 2715 - protein, 16 aa, Artificial Sequence
  source: /note="Description of Artificial Sequence: Synthetic peptide"
  MOD_RES (5)..(5): Citrulline
  MOD_RES (7)..(7): Citrulline
IDFGXGXGSGMSDLEG

SEQ ID NO: 2716 - protein, 16 aa, Artificial Sequence
  source: /note="Description of Artificial Sequence: Synthetic peptide"
  MOD_RES (12)..(12): Citrulline
AICNLCEKSVSXGKPG

SEQ ID NO: 2717 - protein, 16 aa, Artificial Sequence
  source: /note="Description of Artificial Sequence: Synthetic peptide"
  MOD_RES (8)..(8): Citrulline
LTIKESQXGAALGQSH

SEQ ID NO: 2718 - protein, 16 aa, Artificial Sequence
  source: /note="Description of Artificial Sequence: Synthetic peptide"
  MOD_RES (4)..(4): Citrulline
  MOD_RES (15)..(15): Citrulline
ESQXGAALGQSHEAXA

SEQ ID NO: 2719 - protein, 16 aa, Artificial Sequence
  source: /note="Description of Artificial Sequence: Synthetic peptide"
  MOD_RES (10)..(10): Citrulline
  MOD_RES (16)..(16): Citrulline
FAAPGGFLGXGPAAAX

SEQ ID NO: 2720 - protein, 16 aa, Artificial Sequence
  source: /note="Description of Artificial Sequence: Synthetic peptide"
  MOD_RES (6)..(6): Citrulline
  MOD_RES (12)..(12): Citrulline
GGFLGXGPAAAXAAGA

SEQ ID NO: 2721 - protein, 16 aa, Artificial Sequence
  source: /note="Description of Artificial Sequence: Synthetic peptide"
  MOD_RES (3)..(3): Citrulline
  MOD_RES (11)..(11): Citrulline
IAXGPSGVPLXGATVF

SEQ ID NO: 2722 - protein, 16 aa, Artificial Sequence
  source: /note="Description of Artificial Sequence: Synthetic peptide"
  MOD_RES (7)..(7): Citrulline
  MOD_RES (16)..(16): Citrulline
PSGVPLXGATVFPSLX

SEQ ID NO: 2723 - protein, 16 aa, Artificial Sequence
  source: /note="Description of Artificial Sequence: Synthetic peptide"
  MOD_RES (10)..(10): Citrulline
QASNCPCYHXGSMIPN

SEQ ID NO: 2724 - protein, 16 aa, Artificial Sequence
  source: /note="Description of Artificial Sequence: Synthetic peptide"
  MOD_RES (6)..(6): Citrulline
CPCYHXGSMIPNGESV

SEQ ID NO: 2725 - protein, 16 aa, Artificial Sequence
  source: /note="Description of Artificial Sequence: Synthetic peptide"
  MOD_RES (2)..(2): Citrulline
HXGSMIPNGESVHDSG

SEQ ID NO: 2726 - protein, 16 aa, Artificial Sequence
  source: /note="Description of Artificial Sequence: Synthetic peptide"
  MOD_RES (8)..(8): Citrulline
  MOD_RES (10)..(10): Citrulline
CLQGGFVXGXVPAGQS

SEQ ID NO: 2727 - protein, 16 aa, Artificial Sequence
  source: /note="Description of Artificial Sequence: Synthetic peptide"
  MOD_RES (5)..(5): Citrulline
  MOD_RES (11)..(11): Citrulline
SEGGXGTLIIXDVKES

SEQ ID NO: 2728 - protein, 16 aa, Artificial Sequence
  source: /note="Description of Artificial Sequence: Synthetic peptide"
  MOD_RES (1)..(1): Citrulline
  MOD_RES (7)..(7): Citrulline
XGTLIIXDVKESDQGA

SEQ ID NO: 2729 - protein, 16 aa, Artificial Sequence
  source: /note="Description of Artificial Sequence: Synthetic peptide"
  MOD_RES (13)..(13): Citrulline
AGQAHAQVTWYKXGGS

SEQ ID NO: 2730 - protein, 16 aa, Artificial Sequence
  source: /note="Description of Artificial Sequence: Synthetic peptide"
  MOD_RES (9)..(9): Citrulline
  MOD_RES (16)..(16): Citrulline
HAQVTWYKXGGSLPAX

SEQ ID NO: 2731 - protein, 16 aa, Artificial Sequence
  source: /note="Description of Artificial Sequence: Synthetic peptide"
  MOD_RES (13)..(13): Citrulline
PGQSHAQVTWHKXGGS

SEQ ID NO: 2732 - protein, 16 aa, Artificial Sequence
  source: /note="Description of Artificial Sequence: Synthetic peptide"
  MOD_RES (9)..(9): Citrulline
  MOD_RES (16)..(16): Citrulline
HAQVTWHKXGGSLPVX

SEQ ID NO: 2733 - protein, 16 aa, Artificial Sequence
  source: /note="Description of Artificial Sequence: Synthetic peptide"
  MOD_RES (13)..(13): Citrulline
AGQAHAQVTWHKXGGS

SEQ ID NO: 2734 - protein, 16 aa, Artificial Sequence
  source: /note="Description of Artificial Sequence: Synthetic peptide"
  MOD_RES (9)..(9): Citrulline
  MOD_RES (16)..(16): Citrulline
HAQVTWHKXGGSLPAX

SEQ ID NO: 2735 - protein, 16 aa, Artificial Sequence
  source: /note="Description of Artificial Sequence: Synthetic peptide"
  MOD_RES (11)..(11): Citrulline
QAHAQVTWHKXGGSLP

SEQ ID NO: 2736 - protein, 16 aa, Artificial Sequence
  source: /note="Description of Artificial Sequence: Synthetic peptide"
  MOD_RES (11)..(11): Citrulline
QAHAQVTWHKXGGNLP

SEQ ID NO: 2737 - protein, 16 aa, Artificial Sequence
  source: /note="Description of Artificial Sequence: Synthetic peptide"
  MOD_RES (7)..(7): Citrulline
  MOD_RES (14)..(14): Citrulline
QVTWHKXGGNLPAXHQ

SEQ ID NO: 2738 - protein, 16 aa, Artificial Sequence
  source: /note="Description of Artificial Sequence: Synthetic peptide"
  MOD_RES (10)..(10): Citrulline
GGCALNFGPXGSSTVT

SEQ ID NO: 2739 - protein, 16 aa, Artificial Sequence
  source: /note="Description of Artificial Sequence: Synthetic peptide"
  MOD_RES (6)..(6): Citrulline
  MOD_RES (15)..(15): Citrulline
LNFGPXGSSTVTIPXE

SEQ ID NO: 2740 - protein, 16 aa, Artificial Sequence
  source: /note="Description of Artificial Sequence: Synthetic peptide"
  MOD_RES (7)..(7): Citrulline
  MOD_RES (11)..(11): Citrulline
IVGSNLXQLAXGQAGH

SEQ ID NO: 2741 - protein, 16 aa, Artificial Sequence
  source: /note="Description of Artificial Sequence: Synthetic peptide"
  MOD_RES (3)..(3): Citrulline
  MOD_RES (7)..(7): Citrulline
NLXQLAXGQAGHGLGP

SEQ ID NO: 2742 - protein, 16 aa, Artificial Sequence
  source: /note="Description of Artificial Sequence: Synthetic peptide"
  MOD_RES (8)..(8): Citrulline
  MOD_RES (11)..(11): Citrulline
GMEPLPSXSSXGSKVS

SEQ ID NO: 2743 - protein, 16 aa, Artificial Sequence
  source: /note="Description of Artificial Sequence: Synthetic peptide"
  MOD_RES (4)..(4): Citrulline
  MOD_RES (7)..(7): Citrulline
LPSXSSXGSKVSPDVP

SEQ ID NO: 2744 - protein, 16 aa, Artificial Sequence
  source: /note="Description of Artificial Sequence: Synthetic peptide"
  MOD_RES (3)..(3): Citrulline
SSXGSKVSPDVPPPSA

SEQ ID NO: 2745 - protein, 16 aa, Artificial Sequence
  source: /note="Description of Artificial Sequence: Synthetic peptide"
  MOD_RES (9)..(9): Citrulline
CEEGYILEXGQYCKAN

SEQ ID NO: 2746 - protein, 16 aa, Artificial Sequence
  source: /note="Description of Artificial Sequence: Synthetic peptide"
  MOD_RES (5)..(5): Citrulline
YILEXGQYCKANDSFG

SEQ ID NO: 2747 - protein, 16 aa, Artificial Sequence
  source: /note="Description of Artificial Sequence: Synthetic peptide"
  MOD_RES (11)..(11): Citrulline
VLISKNLTNPXGLALD

SEQ ID NO: 2748 - protein, 16 aa, Artificial Sequence
  source: /note="Description of Artificial Sequence: Synthetic peptide"
  MOD_RES (7)..(7): Citrulline
  MOD_RES (14)..(14): Citrulline
KNLTNPXGLALDPXMN

SEQ ID NO: 2749 - protein, 16 aa, Artificial Sequence
  source: /note="Description of Artificial Sequence: Synthetic peptide"
  MOD_RES (6)..(6): Citrulline
TVDPAXGKLYWSDQGT

SEQ ID NO: 2750 - protein, 16 aa, Artificial Sequence
  source: /note="Description of Artificial Sequence: Synthetic peptide"
  MOD_RES (2)..(2): Citrulline
AXGKLYWSDQGTDSGV

SEQ ID NO: 2751 - protein, 16 aa, Artificial Sequence
  source: /note="Description of Artificial Sequence: Synthetic peptide"
  MOD_RES (8)..(8): Citrulline
  MOD_RES (13)..(13): Citrulline
LYWAVTGXGVIEXGNV

SEQ ID NO: 2752 - protein, 16 aa, Artificial Sequence
  source: /note="Description of Artificial Sequence: Synthetic peptide"
  MOD_RES (4)..(4): Citrulline
  MOD_RES (9)..(9): Citrulline
VTGXGVIEXGNVDGTD

SEQ ID NO: 2753 - protein, 16 aa, Artificial Sequence
  source: /note="Description of Artificial Sequence: Synthetic peptide"
  MOD_RES (10)..(10): Citrulline
MEIPKLLPAXGTLQGG

SEQ ID NO: 2754 - protein, 16 aa, Artificial Sequence
  source: /note="Description of Artificial Sequence: Synthetic peptide"
  MOD_RES (6)..(6): Citrulline
KLLPAXGTLQGGGGGG

SEQ ID NO: 2755 - protein, 15 aa, Artificial Sequence
  source: /note="Description of Artificial Sequence: Synthetic peptide"
  MOD_RES (2)..(2): Citrulline
AXGTLQGGGGGGIPA

SEQ ID NO: 2756 - protein, 16 aa, Artificial Sequence
  source: /note="Description of Artificial Sequence: Synthetic peptide"
  MOD_RES (9)..(9): Citrulline
AEVELEYSXGLEKLAE

SEQ ID NO: 2757 - protein, 16 aa, Artificial Sequence
  source: /note="Description of Artificial Sequence: Synthetic peptide"
  MOD_RES (5)..(5): Citrulline
  MOD_RES (13)..(13): Citrulline
LEYSXGLEKLAEXFSS

SEQ ID NO: 2758 - protein, 16 aa, Artificial Sequence
  source: /note="Description of Artificial Sequence: Synthetic peptide"
  MOD_RES (7)..(7): Citrulline
TQAPGSXGSLGDSDGK

SEQ ID NO: 2759 - protein, 16 aa, Artificial Sequence
  source: /note="Description of Artificial Sequence: Synthetic peptide"
  MOD_RES (3)..(3): Citrulline
GSXGSLGDSDGKHETV

SEQ ID NO: 2760 - protein, 16 aa, Artificial Sequence
  source: /note="Description of Artificial Sequence: Synthetic peptide"
  MOD_RES (9)..(10): Citrulline
ASEPGLLAXXGSGSAL

SEQ ID NO: 2761 - protein, 16 aa, Artificial Sequence
  source: /note="Description of Artificial Sequence: Synthetic peptide"
  MOD_RES (5)..(6): Citrulline
GLLAXXGSGSALGGPL

SEQ ID NO: 2762 - protein, 16 aa, Artificial Sequence
  source: /note="Description of Artificial Sequence: Synthetic peptide"
  MOD_RES (2)..(2): Citrulline
  MOD_RES (12)..(12): Citrulline
VXPLGSENLLLXGATL

SEQ ID NO: 2763 - protein, 16 aa, Artificial Sequence
  source: /note="Description of Artificial Sequence: Synthetic peptide"
  MOD_RES (8)..(8): Citrulline
GSENLLLXGATLKNTE

SEQ ID NO: 2764 - protein, 16 aa, Artificial Sequence
  source: /note="Description of Artificial Sequence: Synthetic peptide"
  MOD_RES (4)..(4): Citrulline
LLLXGATLKNTEKIFG

SEQ ID NO: 2765 - protein, 16 aa, Artificial Sequence
  source: /note="Description of Artificial Sequence: Synthetic peptide"
  MOD_RES (13)..(13): Citrulline
HGAADTAYPYGYXGGA

SEQ ID NO: 2766 - protein, 16 aa, Artificial Sequence
  source: /note="Description of Artificial Sequence: Synthetic peptide"
  MOD_RES (9)..(9): Citrulline
  MOD_RES (16)..(16): Citrulline
DTAYPYGYXGGASPGX

SEQ ID NO: 2767 - protein, 16 aa, Artificial Sequence
  source: /note="Description of Artificial Sequence: Synthetic peptide"
  MOD_RES (9)..(9): Citrulline
VTLKEDGVXGLAKGWA

SEQ ID NO: 2768 - protein, 16 aa, Artificial Sequence
  source: /note="Description of Artificial Sequence: Synthetic peptide"
  MOD_RES (5)..(5): Citrulline
EDGVXGLAKGWAPTFL

SEQ ID NO: 2769 - protein, 16 aa, Artificial Sequence
  source: /note="Description of Artificial Sequence: Synthetic peptide"
  MOD_RES (8)..(8): Citrulline
MPGPQGGXGAATMSLG

SEQ ID NO: 2770 - protein, 16 aa, Artificial Sequence
  source: /note="Description of Artificial Sequence: Synthetic peptide"
  MOD_RES (4)..(4): Citrulline
QGGXGAATMSLGKLSP

SEQ ID NO: 2771 - protein, 16 aa, Artificial Sequence
  source: /note="Description of Artificial Sequence: Synthetic peptide"
  MOD_RES (6)..(6): Citrulline
EELLQXGAAQLAELGP

SEQ ID NO: 2772 - protein, 16 aa, Artificial Sequence
  source: /note="Description of Artificial Sequence: Synthetic peptide"
  MOD_RES (2)..(2): Citrulline
QXGAAQLAELGPPGVG

SEQ ID NO: 2773 - protein, 16 aa, Artificial Sequence
  source: /note="Description of Artificial Sequence: Synthetic peptide"
  MOD_RES (13)..(13): Citrulline
ISGEPPPKAMWSXGDK

SEQ ID NO: 2774 - protein, 16 aa, Artificial Sequence
  source: /note="Description of Artificial Sequence: Synthetic peptide"
  MOD_RES (9)..(9): Citrulline
PPPKAMWSXGDKAIME

SEQ ID NO: 2775 - protein, 16 aa, Artificial Sequence
  source: /note="Description of Artificial Sequence: Synthetic peptide"
  MOD_RES (5)..(5): Citrulline
  MOD_RES (16)..(16): Citrulline
AMWSXGDKAIMEGSGX

SEQ ID NO: 2776 - protein, 16 aa, Artificial Sequence
  source: /note="Description of Artificial Sequence: Synthetic peptide"
  MOD_RES (11)..(11): Citrulline
GYNATLNCSVXGNPKP

SEQ ID NO: 2777 - protein, 16 aa, Artificial Sequence
  source: /note="Description of Artificial Sequence: Synthetic peptide"
  MOD_RES (8)..(8): Citrulline
  MOD_RES (10)..(10): Citrulline
SISTLAQXPXGTHLCS

SEQ ID NO: 2778 - protein, 16 aa, Artificial Sequence
  source: /note="Description of Artificial Sequence: Synthetic peptide"
  MOD_RES (4)..(4): Citrulline
  MOD_RES (6)..(6): Citrulline
LAQXPXGTHLCSTTPD

SEQ ID NO: 2779 - protein, 16 aa, Artificial Sequence
  source: /note="Description of Artificial Sequence: Synthetic peptide"
  MOD_RES (1)..(1): Citrulline
  MOD_RES (8)..(8): Citrulline
XNATYLVXGSLGANTA

SEQ ID NO: 2780 - protein, 16 aa, Artificial Sequence
  source: /note="Description of Artificial Sequence: Synthetic peptide"
  MOD_RES (4)..(4): Citrulline
YLVXGSLGANTASSIA

SEQ ID NO: 2781 - protein, 16 aa, Artificial Sequence
  source: /note="Description of Artificial Sequence: Synthetic peptide"
  MOD_RES (2)..(2): Citrulline
  MOD_RES (11)..(11): Citrulline
HXNPLPEYLSXGLMVS

SEQ ID NO: 2782 - protein, 16 aa, Artificial Sequence
  source: /note="Description of Artificial Sequence: Synthetic peptide"
  MOD_RES (7)..(7): Citrulline
LPEYLSXGLMVSLSTD

SEQ ID NO: 2783 - protein, 16 aa, Artificial Sequence
  source: /note="Description of Artificial Sequence: Synthetic peptide"
  MOD_RES (5)..(5): Citrulline
  MOD_RES (15)..(15): Citrulline
KVPFXGAPCSDAAGXQ

SEQ ID NO: 2784 - protein, 16 aa, Artificial Sequence
  source: /note="Description of Artificial Sequence: Synthetic peptide"
  MOD_RES (12)..(12): Citrulline
  MOD_RES (15)..(15): Citrulline
EAQKTENQTIKXGQXL

SEQ ID NO: 2785 - protein, 16 aa, Artificial Sequence
  source: /note="Description of Artificial Sequence: Synthetic peptide"
  MOD_RES (8)..(8): Citrulline
  MOD_RES (11)..(11): Citrulline
TENQTIKXGQXLPVTG

SEQ ID NO: 2786 - protein, 16 aa, Artificial Sequence
  source: /note="Description of Artificial Sequence: Synthetic peptide"
  MOD_RES (4)..(4): Citrulline
  MOD_RES (7)..(7): Citrulline
TIKXGQXLPVTGTAES

SEQ ID NO: 2787 - protein, 16 aa, Artificial Sequence
  source: /note="Description of Artificial Sequence: Synthetic peptide"
  MOD_RES (7)..(7): Citrulline
  MOD_RES (11)..(11): Citrulline
KEVITFXEKNXGSKLF

SEQ ID NO: 2788 - protein, 16 aa, Artificial Sequence
  source: /note="Description of Artificial Sequence: Synthetic peptide"
  MOD_RES (3)..(3): Citrulline
  MOD_RES (7)..(7): Citrulline
TFXEKNXGSKLFNHLS

SEQ ID NO: 2789 - protein, 16 aa, Artificial Sequence
  source: /note="Description of Artificial Sequence: Synthetic peptide"
  MOD_RES (3)..(3): Citrulline
KNXGSKLFNHLSAVSE

SEQ ID NO: 2790 - protein, 16 aa, Artificial Sequence
  source: /note="Description of Artificial Sequence: Synthetic peptide"
  MOD_RES (14)..(14): Citrulline
SCPTPGCTGSGHVXGK

SEQ ID NO: 2791 - protein, 16 aa, Artificial Sequence
  source: /note="Description of Artificial Sequence: Synthetic peptide"
  MOD_RES (10)..(10): Citrulline
  MOD_RES (15)..(15): Citrulline
PGCTGSGHVXGKYSXH

SEQ ID NO: 2792 - protein, 16 aa, Artificial Sequence
  source: /note="Description of Artificial Sequence: Synthetic peptide"
  MOD_RES (10)..(11): Citrulline
KEDPSYDSVXXGAWGN

SEQ ID NO: 2793 - protein, 16 aa, Artificial Sequence
  source: /note="Description of Artificial Sequence: Synthetic peptide"
  MOD_RES (6)..(7): Citrulline
SYDSVXXGAWGNNMNS

SEQ ID NO: 2794 - protein, 16 aa, Artificial Sequence
  source: /note="Description of Artificial Sequence: Synthetic peptide"
  MOD_RES (2)..(3): Citrulline
VXXGAWGNNMNSGLNK

SEQ ID NO: 2795 - protein, 16 aa, Artificial Sequence
  source: /note="Description of Artificial Sequence: Synthetic peptide"
  MOD_RES (6)..(6): Citrulline
GFGGGXGVGSGFGGAG

SEQ ID NO: 2796 - protein, 16 aa, Artificial Sequence
  source: /note="Description of Artificial Sequence: Synthetic peptide"
  MOD_RES (11)..(11): Citrulline
TSTSGSSGSSXGVFGG

SEQ ID NO: 2797 - protein, 16 aa, Artificial Sequence
  source: /note="Description of Artificial Sequence: Synthetic peptide"
  MOD_RES (7)..(7): Citrulline
GSSGSSXGVFGGVSGS

SEQ ID NO: 2798 - protein, 16 aa, Artificial Sequence
  source: /note="Description of Artificial Sequence: Synthetic peptide"
  MOD_RES (3)..(3): Citrulline
SSXGVFGGVSGSGSGG

SEQ ID NO: 2799 - protein, 16 aa, Artificial Sequence
  source: /note="Description of Artificial Sequence: Synthetic peptide"
  MOD_RES (14)..(14): Citrulline
SGYGGVSSGSTGGXGS

SEQ ID NO: 2800 - protein, 16 aa, Artificial Sequence
  source: /note="Description of Artificial Sequence: Synthetic peptide"
  MOD_RES (10)..(10): Citrulline
GVSSGSTGGXGSSGSY

SEQ ID NO: 2801 - protein, 16 aa, Artificial Sequence
  source: /note="Description of Artificial Sequence: Synthetic peptide"
  MOD_RES (6)..(6): Citrulline
GSTGGXGSSGSYQSSS

SEQ ID NO: 2802 - protein, 16 aa, Artificial Sequence
  source: /note="Description of Artificial Sequence: Synthetic peptide"
  MOD_RES (2)..(2): Citrulline
  MOD_RES (16)..(16): Citrulline
GXGSSGSYQSSSSGSX

SEQ ID NO: 2803 - protein, 16 aa, Artificial Sequence
  source: /note="Description of Artificial Sequence: Synthetic peptide"
  MOD_RES (12)..(12): Citrulline
  MOD_RES (15)..(15): Citrulline
QADHANEANYAXGTXL

SEQ ID NO: 2804 - protein, 16 aa, Artificial Sequence
  source: /note="Description of Artificial Sequence: Synthetic peptide"
  MOD_RES (8)..(8): Citrulline
  MOD_RES (11)..(11): Citrulline
ANEANYAXGTXLPLSG

SEQ ID NO: 2805 - protein, 16 aa, Artificial Sequence
  source: /note="Description of Artificial Sequence: Synthetic peptide"
  MOD_RES (3)..(3): Citrulline
  MOD_RES (11)..(11): Citrulline
ILXNMGYLKPXGSFET

SEQ ID NO: 2806 - protein, 16 aa, Artificial Sequence
  source: /note="Description of Artificial Sequence: Synthetic peptide"
  MOD_RES (7)..(7): Citrulline
MGYLKPXGSFETTADD

SEQ ID NO: 2807 - protein, 16 aa, Artificial Sequence
  source: /note="Description of Artificial Sequence: Synthetic peptide"
  MOD_RES (2)..(2): Citrulline
  MOD_RES (13)..(13): Citrulline
SXKYKSDWGYSGXGGY

SEQ ID NO: 2808 - protein, 16 aa, Artificial Sequence
  source: /note="Description of Artificial Sequence: Synthetic peptide"
  MOD_RES (9)..(9): Citrulline
  MOD_RES (16)..(16): Citrulline
KSDWGYSGXGGYQHVX

SEQ ID NO: 2809 - protein, 16 aa, Artificial Sequence
  source: /note="Description of Artificial Sequence: Synthetic peptide"
  MOD_RES (5)..(5): Citrulline
  MOD_RES (12)..(12): Citrulline
GYSGXGGYQHVXSEES

SEQ ID NO: 2810 - protein, 16 aa, Artificial Sequence
  source: /note="Description of Artificial Sequence: Synthetic peptide"
  MOD_RES (12)..(12): Citrulline
AFNDWSKEKQFXGLQS

SEQ ID NO: 2811 - protein, 16 aa, Artificial Sequence
  source: /note="Description of Artificial Sequence: Synthetic peptide"
  MOD_RES (8)..(8): Citrulline
  MOD_RES (13)..(13): Citrulline
WSKEKQFXGLQSXIEQ

SEQ ID NO: 2812 - protein, 16 aa, Artificial Sequence
  source: /note="Description of Artificial Sequence: Synthetic peptide"
  MOD_RES (10)..(10): Citrulline
  MOD_RES (12)..(12): Citrulline
LEQNGSPLGXGXLGST

SEQ ID NO: 2813 - protein, 16 aa, Artificial Sequence
  source: /note="Description of Artificial Sequence: Synthetic peptide"
  MOD_RES (6)..(6): Citrulline
  MOD_RES (8)..(8): Citrulline
GSPLGXGXLGSTGAKM

SEQ ID NO: 2814 - protein, 16 aa, Artificial Sequence
  source: /note="Description of Artificial Sequence: Synthetic peptide"
  MOD_RES (2)..(2): Citrulline
  MOD_RES (4)..(4): Citrulline
GXGXLGSTGAKMQGVP

SEQ ID NO: 2815 - protein, 16 aa, Artificial Sequence
  source: /note="Description of Artificial Sequence: Synthetic peptide"
  MOD_RES (1)..(1): Citrulline
  MOD_RES (10)..(10): Citrulline
XGGMGSAGEXGGFNKP

SEQ ID NO: 2816 - protein, 16 aa, Artificial Sequence
  source: /note="Description of Artificial Sequence: Synthetic peptide"
  MOD_RES (6)..(6): Citrulline
GSAGEXGGFNKPGGPM

SEQ ID NO: 2817 - protein, 16 aa, Artificial Sequence
  source: /note="Description of Artificial Sequence: Synthetic peptide"
  MOD_RES (5)..(5): Citrulline
SKGVXGISGLPGFSGS

SEQ ID NO: 2818 - protein, 16 aa, Artificial Sequence
  source: /note="Description of Artificial Sequence: Synthetic peptide"
  MOD_RES (9)..(9): Citrulline
  MOD_RES (12)..(12): Citrulline
GTPGPPGPXGAXGPQG

SEQ ID NO: 2819 - protein, 16 aa, Artificial Sequence
  source: /note="Description of Artificial Sequence: Synthetic peptide"
  MOD_RES (5)..(5): Citrulline
  MOD_RES (8)..(8): Citrulline
PPGPXGAXGPQGPSGP

SEQ ID NO: 2820 - protein, 16 aa, Artificial Sequence
  source: /note="Description of Artificial Sequence: Synthetic peptide"
  MOD_RES (5)..(5): Citrulline
  MOD_RES (11)..(11): Citrulline
QTGNXGPPGSXGSPGA

SEQ ID NO: 2821 - protein, 16 aa, Artificial Sequence
  source: /note="Description of Artificial Sequence: Synthetic peptide"
  MOD_RES (1)..(1): Citrulline
  MOD_RES (7)..(7): Citrulline
XGPPGSXGSPGAPGPP

SEQ ID NO: 2822 - protein, 16 aa, Artificial Sequence
  source: /note="Description of Artificial Sequence: Synthetic peptide"
  MOD_RES (3)..(3): Citrulline
GSXGSPGAPGPPGPPG

SEQ ID NO: 2823 - protein, 16 aa, Artificial Sequence
  source: /note="Description of Artificial Sequence: Synthetic peptide"
  MOD_RES (2)..(2): Citrulline
PXGDPGFQGFPGVKGE

SEQ ID NO: 2824 - protein, 16 aa, Artificial Sequence
  source: /note="Description of Artificial Sequence: Synthetic peptide"
  MOD_RES (7)..(8): Citrulline
TVVETLXXGSKFIKWD

SEQ ID NO: 2825 - protein, 16 aa, Artificial Sequence
  source: /note="Description of Artificial Sequence: Synthetic peptide"
  MOD_RES (5)..(5): Citrulline
  MOD_RES (11)..(11): Citrulline
APVQXQPKHVXGQNVE

SEQ ID NO: 2826 - protein, 16 aa, Artificial Sequence
  source: /note="Description of Artificial Sequence: Synthetic peptide"
  MOD_RES (1)..(1): Citrulline
  MOD_RES (7)..(7): Citrulline
XQPKHVXGQNVEMSML

SEQ ID NO: 2827 - protein, 16 aa, Artificial Sequence
  source: /note="Description of Artificial Sequence: Synthetic peptide"
  MOD_RES (3)..(3): Citrulline
HVXGQNVEMSMLNAYK

SEQ ID NO: 2828 - protein, 16 aa, Artificial Sequence
  source: /note="Description of Artificial Sequence: Synthetic peptide"
  MOD_RES (11)..(11): Citrulline
MGFIQAMSALXGMKLM

SEQ ID NO: 2829 - protein, 16 aa, Artificial Sequence
  source: /note="Description of Artificial Sequence: Synthetic peptide"
  MOD_RES (7)..(7): Citrulline
QAMSALXGMKLMYKGE

SEQ ID NO: 2830 - protein, 16 aa, Artificial Sequence
  source: /note="Description of Artificial Sequence: Synthetic peptide"
  MOD_RES (3)..(3): Citrulline
ALXGMKLMYKGEDGKA

SEQ ID NO: 2831 - protein, 16 aa, Artificial Sequence
  source: /note="Description of Artificial Sequence: Synthetic peptide"
  MOD_RES (7)..(7): Citrulline
  MOD_RES (14)..(14): Citrulline
GGLAGPXGGLNTSXSL

SEQ ID NO: 2832 - protein, 16 aa, Artificial Sequence
  source: /note="Description of Artificial Sequence: Synthetic peptide"
  MOD_RES (3)..(3): Citrulline
  MOD_RES (10)..(10): Citrulline
GPXGGLNTSXSLYSGL

SEQ ID NO: 2833 - protein, 16 aa, Artificial Sequence
  source: /note="Description of Artificial Sequence: Synthetic peptide"
  MOD_RES (13)..(13): Citrulline
PGTAYQSPLPLSXGSL

SEQ ID NO: 2834 - protein, 16 aa, Artificial Sequence
  source: /note="Description of Artificial Sequence: Synthetic peptide"
  MOD_RES (9)..(9): Citrulline
YQSPLPLSXGSLAAVA

SEQ ID NO: 2835 - protein, 16 aa, Artificial Sequence
  source: /note="Description of Artificial Sequence: Synthetic peptide"
  MOD_RES (5)..(5): Citrulline
LPLSXGSLAAVAHAQS

SEQ ID NO: 2836 - protein, 16 aa, Artificial Sequence
  source: /note="Description of Artificial Sequence: Synthetic peptide"
  MOD_RES (12)..(12): Citrulline
TKLIKGDIYKTXGGGQ

SEQ ID NO: 2837 - protein, 16 aa, Artificial Sequence
  source: /note="Description of Artificial Sequence: Synthetic peptide"
  MOD_RES (8)..(8): Citrulline
KGDIYKTXGGGQSVQF

SEQ ID NO: 2838 - protein, 16 aa, Artificial Sequence
  source: /note="Description of Artificial Sequence: Synthetic peptide"
  MOD_RES (4)..(4): Citrulline
YKTXGGGQSVQFTDIE

SEQ ID NO: 2839 - protein, 16 aa, Artificial Sequence
  source: /note="Description of Artificial Sequence: Synthetic peptide"
  MOD_RES (4)..(4): Citrulline
  MOD_RES (8)..(8): Citrulline
TGSXSSFXGDTNFYGK

SEQ ID NO: 2840 - protein, 16 aa, Artificial Sequence
  source: /note="Description of Artificial Sequence: Synthetic peptide"
  MOD_RES (8)..(8): Citrulline
SAGLPGLXGLLGPQGQ

SEQ ID NO: 2841 - protein, 16 aa, Artificial Sequence
  source: /note="Description of Artificial Sequence: Synthetic peptide"
  MOD_RES (4)..(4): Citrulline
PGLXGLLGPQGQPGAA

SEQ ID NO: 2842 - protein, 16 aa, Artificial Sequence
  source: /note="Description of Artificial Sequence: Synthetic peptide"
  MOD_RES (2)..(2): Citrulline
  MOD_RES (14)..(14): Citrulline
IXGEKGDVGFMGPXGL

SEQ ID NO: 2843 - protein, 16 aa, Artificial Sequence
  source: /note="Description of Artificial Sequence: Synthetic peptide"
  MOD_RES (10)..(10): Citrulline
  MOD_RES (16)..(16): Citrulline
KGDVGFMGPXGLKGEX

SEQ ID NO: 2844 - protein, 16 aa, Artificial Sequence
  source: /note="Description of Artificial Sequence: Synthetic peptide"
  MOD_RES (6)..(6): Citrulline
  MOD_RES (12)..(12): Citrulline
GFMGPXGLKGEXGVKG

SEQ ID NO: 2845 - protein, 16 aa, Artificial Sequence
  source: /note="Description of Artificial Sequence: Synthetic peptide"
  MOD_RES (2)..(2): Citrulline
  MOD_RES (8)..(8): Citrulline
PXGLKGEXGVKGACGL

SEQ ID NO: 2846 - protein, 16 aa, Artificial Sequence
  source: /note="Description of Artificial Sequence: Synthetic peptide"
  MOD_RES (3)..(3): Citrulline
  MOD_RES (14)..(14): Citrulline
LDXEQYGQYALAVXGS

SEQ ID NO: 2847 - protein, 16 aa, Artificial Sequence
  source: /note="Description of Artificial Sequence: Synthetic peptide"
  MOD_RES (10)..(10): Citrulline
  MOD_RES (14)..(14): Citrulline
QYGQYALAVXGSDXDG

SEQ ID NO: 2848 - protein, 16 aa, Artificial Sequence
  source: /note="Description of Artificial Sequence: Synthetic peptide"
  MOD_RES (6)..(6): Citrulline
  MOD_RES (10)..(10): Citrulline
YALAVXGSDXDGGADG

SEQ ID NO: 2849 - protein, 16 aa, Artificial Sequence
  source: /note="Description of Artificial Sequence: Synthetic peptide"
  MOD_RES (10)..(10): Citrulline
YVLTYNYEGXGSVAGS

SEQ ID NO: 2850 - protein, 16 aa, Artificial Sequence
  source: /note="Description of Artificial Sequence: Synthetic peptide"
  MOD_RES (11)..(11): Citrulline
TSEFTTESFTXGSTST

SEQ ID NO: 2851 - protein, 16 aa, Artificial Sequence
  source: /note="Description of Artificial Sequence: Synthetic peptide"
  MOD_RES (7)..(7): Citrulline
TTESFTXGSTSTNAIL

SEQ ID NO: 2852 - protein, 16 aa, Artificial Sequence
  source: /note="Description of Artificial Sequence: Synthetic peptide"
  MOD_RES (13)..(13): Citrulline
LLGSPYYYSAAAXGAA

SEQ ID NO: 2853 - protein, 16 aa, Artificial Sequence
  source: /note="Description of Artificial Sequence: Synthetic peptide"
  MOD_RES (9)..(9): Citrulline
PYYYSAAAXGAAPPAA

SEQ ID NO: 2854 - protein, 16 aa, Artificial Sequence
  source: /note="Description of Artificial Sequence: Synthetic peptide"
  MOD_RES (7)..(7): Citrulline
IGLPPPXGLNLLPKSQ

SEQ ID NO: 2855 - protein, 16 aa, Artificial Sequence
  source: /note="Description of Artificial Sequence: Synthetic peptide"
  MOD_RES (3)..(3): Citrulline
PPXGLNLLPKSQTTLN

SEQ ID NO: 2856 - protein, 16 aa, Artificial Sequence
  source: /note="Description of Artificial Sequence: Synthetic peptide"
  MOD_RES (10)..(10): Citrulline
  MOD_RES (16)..(16): Citrulline
HLCLVMEYAXGGALSX

SEQ ID NO: 2857 - protein, 16 aa, Artificial Sequence
  source: /note="Description of Artificial Sequence: Synthetic peptide"
  MOD_RES (6)..(6): Citrulline
  MOD_RES (12)..(12): Citrulline
VMEYAXGGALSXVLAG

SEQ ID NO: 2858 - protein, 16 aa, Artificial Sequence
  source: /note="Description of Artificial Sequence: Synthetic peptide"
  MOD_RES (12)..(12): Citrulline
GSSSGGSGTWSXGGPP

SEQ ID NO: 2859 - protein, 16 aa, Artificial Sequence
  source: /note="Description of Artificial Sequence: Synthetic peptide"
  MOD_RES (8)..(8): Citrulline
GGSGTWSXGGPPKKEE

SEQ ID NO: 2860 - protein, 16 aa, Artificial Sequence
  source: /note="Description of Artificial Sequence: Synthetic peptide"
  MOD_RES (4)..(4): Citrulline
TWSXGGPPKKEELVGG

SEQ ID NO: 2861 - protein, 16 aa, Artificial Sequence
  source: /note="Description of Artificial Sequence: Synthetic peptide"
  MOD_RES (10)..(11): Citrulline
DSNNEKGLFXXGEAHL

SEQ ID NO: 2862 - protein, 16 aa, Artificial Sequence
  source: /note="Description of Artificial Sequence: Synthetic peptide"
  MOD_RES (6)..(7): Citrulline
EKGLFXXGEAHLAVND

SEQ ID NO: 2863 - protein, 16 aa, Artificial Sequence
  source: /note="Description of Artificial Sequence: Synthetic peptide"
  MOD_RES (8)..(8): Citrulline
YNFASDCXGSYKEFAV

SEQ ID NO: 2864 - protein, 16 aa, Artificial Sequence
  source: /note="Description of Artificial Sequence: Synthetic peptide"
  MOD_RES (6)..(6): Citrulline
  MOD_RES (8)..(8): Citrulline
LSTALXAXGLPVASVT

SEQ ID NO: 2865 - protein, 16 aa, Artificial Sequence
  source: /note="Description of Artificial Sequence: Synthetic peptide"
  MOD_RES (2)..(2): Citrulline
  MOD_RES (4)..(4): Citrulline
LXAXGLPVASVTSMEP

SEQ ID NO: 2866 - protein, 16 aa, Artificial Sequence
  source: /note="Description of Artificial Sequence: Synthetic peptide"
  MOD_RES (1)..(1): Citrulline
  MOD_RES (12)..(12): Citrulline
XLFATYMLDPAXGSFL

SEQ ID NO: 2867 - protein, 16 aa, Artificial Sequence
  source: /note="Description of Artificial Sequence: Synthetic peptide"
  MOD_RES (8)..(8): Citrulline
TYMLDPAXGSFLSAGT

SEQ ID NO: 2868 - protein, 16 aa, Artificial Sequence
  source: /note="Description of Artificial Sequence: Synthetic peptide"
  MOD_RES (4)..(4): Citrulline
  MOD_RES (13)..(13): Citrulline
DPAXGSFLSAGTXMHF

SEQ ID NO: 2869 - protein, 16 aa, Artificial Sequence
  source: /note="Description of Artificial Sequence: Synthetic peptide"
  MOD_RES (6)..(6): Citrulline
GLFLAXGAEGPAALWE

SEQ ID NO: 2870 - protein, 16 aa, Artificial Sequence
  source: /note="Description of Artificial Sequence: Synthetic peptide"
  MOD_RES (9)..(9): Citrulline
TAEVLLDAXGSLLPAK

SEQ ID NO: 2871 - protein, 16 aa, Artificial Sequence
  source: /note="Description of Artificial Sequence: Synthetic peptide"
  MOD_RES (5)..(5): Citrulline
LLDAXGSLLPAKNDIQ

SEQ ID NO: 2872 - protein, 16 aa, Artificial Sequence
  source: /note="Description of Artificial Sequence: Synthetic peptide"
  MOD_RES (1)..(1): Citrulline
XGSLLPAKNDIQKTLD

SEQ ID NO: 2873 - protein, 16 aa, Artificial Sequence
  source: /note="Description of Artificial Sequence: Synthetic peptide"
  MOD_RES (13)..(14): Citrulline
ALAQVSVAGSGTXXGS

SEQ ID NO: 2874 - protein, 16 aa, Artificial Sequence
  source: /note="Description of Artificial Sequence: Synthetic peptide"
  MOD_RES (9)..(10): Citrulline
VSVAGSGTXXGSPAVT

SEQ ID NO: 2875 - protein, 16 aa, Artificial Sequence
  source: /note="Description of Artificial Sequence: Synthetic peptide"
  MOD_RES (9)..(9): Citrulline
PAKDKSSTXGEKVKAE

SEQ ID NO: 2876 - protein, 16 aa, Artificial Sequence
  source: /note="Description of Artificial Sequence: Synthetic peptide"
  MOD_RES (5)..(5): Citrulline
  MOD_RES (16)..(16): Citrulline
KSSTXGEKVKAESEPX

SEQ ID NO: 2877 - protein, 16 aa, Artificial Sequence
  source: /note="Description of Artificial Sequence: Synthetic peptide"
  MOD_RES (13)..(13): Citrulline
EAFKDSEGYIYAXGAQ

SEQ ID NO: 2878 - protein, 16 aa, Artificial Sequence
  source: /note="Description of Artificial Sequence: Synthetic peptide"
  MOD_RES (9)..(9): Citrulline
DSEGYIYAXGAQDMKC

SEQ ID NO: 2879 - protein, 16 aa, Artificial Sequence
  source: /note="Description of Artificial Sequence: Synthetic peptide"
  MOD_RES (5)..(5): Citrulline
YIYAXGAQDMKCVSIQ

SEQ ID NO: 2880 - protein, 16 aa, Artificial Sequence
  source: /note="Description of Artificial Sequence: Synthetic peptide"
  MOD_RES (4)..(4): Citrulline
  MOD_RES (8)..(8): Citrulline
FAMXKIYXGEELTYDY

SEQ ID NO: 2881 - protein, 16 aa, Artificial Sequence
  source: /note="Description of Artificial Sequence: Synthetic peptide"
  MOD_RES (4)..(4): Citrulline
KIYXGEELTYDYKFPI

SEQ ID NO: 2882 - protein, 16 aa, Artificial Sequence
  source: /note="Description of Artificial Sequence: Synthetic peptide"
  MOD_RES (3)..(3): Citrulline
  MOD_RES (11)..(11): Citrulline
YQXAFNEFLEXGKQLT

SEQ ID NO: 2883 - protein, 16 aa, Artificial Sequence
  source: /note="Description of Artificial Sequence: Synthetic peptide"
  MOD_RES (7)..(7): Citrulline
  MOD_RES (15)..(15): Citrulline
FNEFLEXGKQLTNYXA

SEQ ID NO: 2884 - protein, 16 aa, Artificial Sequence
  source: /note="Description of Artificial Sequence: Synthetic peptide"
  MOD_RES (3)..(3): Citrulline
  MOD_RES (11)..(11): Citrulline
LEXGKQLTNYXANVIA

SEQ ID NO: 2885 - protein, 16 aa, Artificial Sequence
  source: /note="Description of Artificial Sequence: Synthetic peptide"
  MOD_RES (6)..(6): Citrulline
  MOD_RES (15)..(15): Citrulline
GEAGPXGAPGIPGTXG

SEQ ID NO: 2886 - protein, 16 aa, Artificial Sequence
  source: /note="Description of Artificial Sequence: Synthetic peptide"
  MOD_RES (2)..(2): Citrulline
  MOD_RES (11)..(11): Citrulline
PXGAPGIPGTXGPIGP

SEQ ID NO: 2887 - protein, 16 aa, Artificial Sequence
  source: /note="Description of Artificial Sequence: Synthetic peptide"
  MOD_RES (7)..(7): Citrulline
PGIPGTXGPIGPPGIP

SEQ ID NO: 2888 - protein, 16 aa, Artificial Sequence
  source: /note="Description of Artificial Sequence: Synthetic peptide"
  MOD_RES (3)..(3): Citrulline
GTXGPIGPPGIPGFPG

SEQ ID NO: 2889 - protein, 16 aa, Artificial Sequence
  source: /note="Description of Artificial Sequence: Synthetic peptide"
  MOD_RES (11)..(11): Citrulline
  MOD_RES (13)..(13): Citrulline
MISSVCVSSYXGXKSG

SEQ ID NO: 2890 - protein, 16 aa, Artificial Sequence
  source: /note="Description of Artificial Sequence: Synthetic peptide"
  MOD_RES (7)..(7): Citrulline
  MOD_RES (9)..(9): Citrulline
VCVSSYXGXKSGNKPP

SEQ ID NO: 2891 - protein, 16 aa, Artificial Sequence
  source: /note="Description of Artificial Sequence: Synthetic peptide"
  MOD_RES (5)..(5): Citrulline
  MOD_RES (7)..(7): Citrulline
MGFPXGXAEKALALTG

SEQ ID NO: 2892 - protein, 16 aa, Artificial Sequence
  source: /note="Description of Artificial Sequence: Synthetic peptide"
  MOD_RES (1)..(1): Citrulline
  MOD_RES (3)..(3): Citrulline
XGXAEKALALTGNQGI

SEQ ID NO: 2893 - protein, 16 aa, Artificial Sequence
  source: /note="Description of Artificial Sequence: Synthetic peptide"
  MOD_RES (11)..(11): Citrulline
GWNLPGGGVQXGNILN

SEQ ID NO: 2894 - protein, 16 aa, Artificial Sequence
  source: /note="Description of Artificial Sequence: Synthetic peptide"
  MOD_RES (7)..(7): Citrulline
PGGGVQXGNILNLNGA

SEQ ID NO: 2895 - protein, 16 aa, Artificial Sequence
  source: /note="Description of Artificial Sequence: Synthetic peptide"
  MOD_RES (3)..(3): Citrulline
VQXGNILNLNGAGDPL

SEQ ID NO: 2896 - protein, 16 aa, Artificial Sequence
  source: /note="Description of Artificial Sequence: Synthetic peptide"
  MOD_RES (12)..(13): Citrulline
TPGYPANEYAYXXGIA

SEQ ID NO: 2897 - protein, 16 aa, Artificial Sequence
  source: /note="Description of Artificial Sequence: Synthetic peptide"
  MOD_RES (8)..(9): Citrulline
PANEYAYXXGIAEAVG

SEQ ID NO: 2898 - protein, 16 aa, Artificial Sequence
  source: /note="Description of Artificial Sequence: Synthetic peptide"
  MOD_RES (8)..(8): Citrulline
APPDSSWXGSLKVPYN

SEQ ID NO: 2899 - protein, 16 aa, Artificial Sequence
  source: /note="Description of Artificial Sequence: Synthetic peptide"
  MOD_RES (4)..(4): Citrulline
SSWXGSLKVPYNVGPG

SEQ ID NO: 2900 - protein, 16 aa, Artificial Sequence
  source: /note="Description of Artificial Sequence: Synthetic peptide"
  MOD_RES (10)..(10): Citrulline
GGPPGPPISXGLPLVD

SEQ ID NO: 2901 - protein, 16 aa, Artificial Sequence
  source: /note="Description of Artificial Sequence: Synthetic peptide"
  MOD_RES (6)..(6): Citrulline
GPPISXGLPLVDDGGW

SEQ ID NO: 2902 - protein, 16 aa, Artificial Sequence
  source: /note="Description of Artificial Sequence: Synthetic peptide"
  MOD_RES (2)..(2): Citrulline
SXGLPLVDDGGWNTVP

SEQ ID NO: 2903 - protein, 16 aa, Artificial Sequence
  source: /note="Description of Artificial Sequence: Synthetic peptide"
  MOD_RES (8)..(8): Citrulline
VDVELVQXGDIIKVVP

SEQ ID NO: 2904 - protein, 16 aa, Artificial Sequence
  source: /note="Description of Artificial Sequence: Synthetic peptide"
  MOD_RES (4)..(4): Citrulline
LVQXGDIIKVVPGGKF

SEQ ID NO: 2905 - protein, 16 aa, Artificial Sequence
  source: /note="Description of Artificial Sequence: Synthetic peptide"
  MOD_RES (9)..(9): Citrulline
ADPSHSCPXGAAGQSS

SEQ ID NO: 2906 - protein, 16 aa, Artificial Sequence
  source: /note="Description of Artificial Sequence: Synthetic peptide"
  MOD_RES (5)..(5): Citrulline
HSCPXGAAGQSSWAPA

SEQ ID NO: 2907 - protein, 16 aa, Artificial Sequence
  source: /note="Description of Artificial Sequence: Synthetic peptide"
  MOD_RES (10)..(10): Citrulline
  MOD_RES (16)..(16): Citrulline
SSVSPSASFXGAEKHX

SEQ ID NO: 2908 - protein, 16 aa, Artificial Sequence
  source: /note="Description of Artificial Sequence: Synthetic peptide"
  MOD_RES (6)..(6): Citrulline
  MOD_RES (12)..(12): Citrulline
PSASFXGAEKHXNSAD

SEQ ID NO: 2909 - protein, 16 aa, Artificial Sequence
  source: /note="Description of Artificial Sequence: Synthetic peptide"
  MOD_RES (9)..(10): Citrulline
EGFFALHQXXGAIKQA

SEQ ID NO: 2910 - protein, 16 aa, Artificial Sequence
  source: /note="Description of Artificial Sequence: Synthetic peptide"
  MOD_RES (5)..(6): Citrulline
ALHQXXGAIKQAKVHH

SEQ ID NO: 2911 - protein, 16 aa, Artificial Sequence
  source: /note="Description of Artificial Sequence: Synthetic peptide"
  MOD_RES (6)..(6): Citrulline
  MOD_RES (12)..(12): Citrulline
CVGKGXYGEVWXGSWQ

SEQ ID NO: 2912 - protein, 16 aa, Artificial Sequence
  source: /note="Description of Artificial Sequence: Synthetic peptide"
  MOD_RES (2)..(2): Citrulline
  MOD_RES (8)..(8): Citrulline
GXYGEVWXGSWQGENV

SEQ ID NO: 2913 - protein, 16 aa, Artificial Sequence
  source: /note="Description of Artificial Sequence: Synthetic peptide"
  MOD_RES (10)..(10): Citrulline
  MOD_RES (14)..(14): Citrulline
EFHPHSGPLXGSTXLT

SEQ ID NO: 2914 - protein, 16 aa, Artificial Sequence
  source: /note="Description of Artificial Sequence: Synthetic peptide"
  MOD_RES (6)..(6): Citrulline
  MOD_RES (10)..(10): Citrulline
HSGPLXGSTXLTLCGS

SEQ ID NO: 2915 - protein, 16 aa, Artificial Sequence
  source: /note="Description of Artificial Sequence: Synthetic peptide"
  MOD_RES (3)..(3): Citrulline
  MOD_RES (7)..(7): Citrulline
QCXTEYXGALLWMKDV

SEQ ID NO: 2916 - protein, 16 aa, Artificial Sequence
  source: /note="Description of Artificial Sequence: Synthetic peptide"
  MOD_RES (3)..(3): Citrulline
EYXGALLWMKDVSQEL

SEQ ID NO: 2917 - protein, 16 aa, Artificial Sequence
  source: /note="Description of Artificial Sequence: Synthetic peptide"
  MOD_RES (10)..(10): Citrulline
SKDTSTGGGXGALQNQ

SEQ ID NO: 2918 - protein, 16 aa, Artificial Sequence
  source: /note="Description of Artificial Sequence: Synthetic peptide"
  MOD_RES (6)..(6): Citrulline
STGGGXGALQNQKDTV

SEQ ID NO: 2919 - protein, 16 aa, Artificial Sequence
  source: /note="Description of Artificial Sequence: Synthetic peptide"
  MOD_RES (4)..(4): Citrulline
  MOD_RES (11)..(11): Citrulline
EKYXVVYYPTXGGKPD

SEQ ID NO: 2920 - protein, 16 aa, Artificial Sequence
  source: /note="Description of Artificial Sequence: Synthetic peptide"
  MOD_RES (7)..(7): Citrulline
VVYYPTXGGKPDEVVV

SEQ ID NO: 2921 - protein, 16 aa, Artificial Sequence
  source: /note="Description of Artificial Sequence: Synthetic peptide"
  MOD_RES (8)..(8): Citrulline
GNALTPKXGVFGKTGD

SEQ ID NO: 2922 - protein, 16 aa, Artificial Sequence
  source: /note="Description of Artificial Sequence: Synthetic peptide"
  MOD_RES (4)..(4): Citrulline
TPKXGVFGKTGDLQTI

SEQ ID NO: 2923 - protein, 16 aa, Artificial Sequence
  source: /note="Description of Artificial Sequence: Synthetic peptide"
  MOD_RES (8)..(8): Citrulline
THIDWDIXGKLLQVNT

SEQ ID NO: 2924 - protein, 16 aa, Artificial Sequence
  source: /note="Description of Artificial Sequence: Synthetic peptide"
  MOD_RES (4)..(4): Citrulline
WDIXGKLLQVNTGAKE

SEQ ID NO: 2925 - protein, 16 aa, Artificial Sequence
  source: /note="Description of Artificial Sequence: Synthetic peptide"
  MOD_RES (7)..(7): Citrulline
  MOD_RES (16)..(16): Citrulline
ENLLLTXGVDGSFLAX

SEQ ID NO: 2926 - protein, 16 aa, Artificial Sequence
  source: /note="Description of Artificial Sequence: Synthetic peptide"
  MOD_RES (3)..(3): Citrulline
  MOD_RES (12)..(12): Citrulline
LTXGVDGSFLAXPSKS

SEQ ID NO: 2927 - protein, 16 aa, Artificial Sequence
  source: /note="Description of Artificial Sequence: Synthetic peptide"
  MOD_RES (8)..(8): Citrulline
  MOD_RES (11)..(11): Citrulline
QAFTGIPXVKXGSTFQ

SEQ ID NO: 2928 - protein, 16 aa, Artificial Sequence
  source: /note="Description of Artificial Sequence: Synthetic peptide"
  MOD_RES (4)..(4): Citrulline
  MOD_RES (7)..(7): Citrulline
GIPXVKXGSTFQNTYN

SEQ ID NO: 2929 - protein, 16 aa, Artificial Sequence
  source: /note="Description of Artificial Sequence: Synthetic peptide"
  MOD_RES (3)..(3): Citrulline
VKXGSTFQNTYNLKDI

SEQ ID NO: 2930 - protein, 16 aa, Artificial Sequence
  source: /note="Description of Artificial Sequence: Synthetic peptide"
  MOD_RES (8)..(8): Citrulline
LVECKSSXGSLSQEKE

SEQ ID NO: 2931 - protein, 16 aa, Artificial Sequence
  source: /note="Description of Artificial Sequence: Synthetic peptide"
  MOD_RES (4)..(4): Citrulline
KSSXGSLSQEKEMMQI

SEQ ID NO: 2932 - protein, 16 aa, Artificial Sequence
  source: /note="Description of Artificial Sequence: Synthetic peptide"
  MOD_RES (6)..(6): Citrulline
  MOD_RES (15)..(15): Citrulline
SGAVTXGKTIQKEGXM

SEQ ID NO: 2933 - protein, 16 aa, Artificial Sequence
  source: /note="Description of Artificial Sequence: Synthetic peptide"
  MOD_RES (8)..(8): Citrulline
TMWEIMTXGQTPYAGI

SEQ ID NO: 2934 - protein, 16 aa, Artificial Sequence
  source: /note="Description of Artificial Sequence: Synthetic peptide"
  MOD_RES (4)..(4): Citrulline
IMTXGQTPYAGIENAE

SEQ ID NO: 2935 - protein, 16 aa, Artificial Sequence
  source: /note="Description of Artificial Sequence: Synthetic peptide"
  MOD_RES (7)..(7): Citrulline
  MOD_RES (13)..(13): Citrulline
VSPLPVXGGHVMXGTA

SEQ ID NO: 2936 - protein, 16 aa, Artificial Sequence
  source: /note="Description of Artificial Sequence: Synthetic peptide"
  MOD_RES (3)..(3): Citrulline
  MOD_RES (9)..(9): Citrulline
PVXGGHVMXGTAFAYV

SEQ ID NO: 2937 - protein, 16 aa, Artificial Sequence
  source: /note="Description of Artificial Sequence: Synthetic peptide"
  MOD_RES (5)..(5): Citrulline
GHVMXGTAFAYVPSPQ

SEQ ID NO: 2938 - protein, 16 aa, Artificial Sequence
  source: /note="Description of Artificial Sequence: Synthetic peptide"
  MOD_RES (10)..(10): Citrulline
IQLQKDPGYXGLAFQQ

SEQ ID NO: 2939 - protein, 16 aa, Artificial Sequence
  source: /note="Description of Artificial Sequence: Synthetic peptide"
  MOD_RES (6)..(6): Citrulline
  MOD_RES (15)..(15): Citrulline
KDPGYXGLAFQQPGXG

SEQ ID NO: 2940 - protein, 16 aa, Artificial Sequence
  source: /note="Description of Artificial Sequence: Synthetic peptide"
  MOD_RES (6)..(6): Citrulline
  MOD_RES (15)..(15): Citrulline
GQTGLXGTPGEKGPXG

SEQ ID NO: 2941 - protein, 16 aa, Artificial Sequence
  source: /note="Description of Artificial Sequence: Synthetic peptide"
  MOD_RES (2)..(2): Citrulline
  MOD_RES (11)..(11): Citrulline
LXGTPGEKGPXGEKGE

SEQ ID NO: 2942 - protein, 16 aa, Artificial Sequence
  source: /note="Description of Artificial Sequence: Synthetic peptide"
  MOD_RES (1)..(1): Citrulline
  MOD_RES (11)..(11): Citrulline
XIGKNHKEVEXGIIPN

SEQ ID NO: 2943 - protein, 16 aa, Artificial Sequence
  source: /note="Description of Artificial Sequence: Synthetic peptide"
  MOD_RES (7)..(7): Citrulline
  MOD_RES (15)..(15): Citrulline
NHKEVEXGIIPNKNXA

SEQ ID NO: 2944 - protein, 16 aa, Artificial Sequence
  source: /note="Description of Artificial Sequence: Synthetic peptide"
  MOD_RES (13)..(13): Citrulline
PGSSTDNLKHSTXGIL

SEQ ID NO: 2945 - protein, 16 aa, Artificial Sequence
  source: /note="Description of Artificial Sequence: Synthetic peptide"
  MOD_RES (9)..(9): Citrulline
TDNLKHSTXGILGSQE

SEQ ID NO: 2946 - protein, 16 aa, Artificial Sequence
  source: /note="Description of Artificial Sequence: Synthetic peptide"
  MOD_RES (5)..(5): Citrulline
KHSTXGILGSQEPDFK

SEQ ID NO: 2947 - protein, 16 aa, Artificial Sequence
  source: /note="Description of Artificial Sequence: Synthetic peptide"
  MOD_RES (9)..(9): Citrulline
ALLSSVLQXGGVITDE

SEQ ID NO: 2948 - protein, 16 aa, Artificial Sequence
  source: /note="Description of Artificial Sequence: Synthetic peptide"
  MOD_RES (5)..(5): Citrulline
SVLQXGGVITDEEETS

SEQ ID NO: 2949 - protein, 16 aa, Artificial Sequence
  source: /note="Description of Artificial Sequence: Synthetic peptide"
  MOD_RES (11)..(11): Citrulline
WTDVVEDKIYXGKLLD

SEQ ID NO: 2950 - protein, 16 aa, Artificial Sequence
  source: /note="Description of Artificial Sequence: Synthetic peptide"
  MOD_RES (7)..(7): Citrulline
VEDKIYXGKLLDNGAL

SEQ ID NO: 2951 - protein, 16 aa, Artificial Sequence
  source: /note="Description of Artificial Sequence: Synthetic peptide"
  MOD_RES (3)..(3): Citrulline
IYXGKLLDNGALTSFE

SEQ ID NO: 2952 - protein, 16 aa, Artificial Sequence
  source: /note="Description of Artificial Sequence: Synthetic peptide"
  MOD_RES (9)..(9): Citrulline
ASLHEAWTXGKEEMLS

SEQ ID NO: 2953 - protein, 16 aa, Artificial Sequence
  source: /note="Description of Artificial Sequence: Synthetic peptide"
  MOD_RES (5)..(5): Citrulline
  MOD_RES (14)..(14): Citrulline
EAWTXGKEEMLSQXDY

SEQ ID NO: 2954 - protein, 16 aa, Artificial Sequence
  source: /note="Description of Artificial Sequence: Synthetic peptide"
  MOD_RES (1)..(1): Citrulline
  MOD_RES (11)..(11): Citrulline
XGANLKDYYSXKEEQE

SEQ ID NO: 2955 - protein, 16 aa, Artificial Sequence
  source: /note="Description of Artificial Sequence: Synthetic peptide"
  MOD_RES (6)..(7): Citrulline
NGSGYXXGGSSYSGGG

SEQ ID NO: 2956 - protein, 16 aa, Artificial Sequence
  source: /note="Description of Artificial Sequence: Synthetic peptide"
  MOD_RES (2)..(3): Citrulline
YXXGGSSYSGGGYGGG

SEQ ID NO: 2957 - protein, 16 aa, Artificial Sequence
  source: /note="Description of Artificial Sequence: Synthetic peptide"
  MOD_RES (3)..(3): Citrulline
  MOD_RES (15)..(15): Citrulline
SFXAGYGAGVGGGYXG

SEQ ID NO: 2958 - protein, 16 aa, Artificial Sequence
  source: /note="Description of Artificial Sequence: Synthetic peptide"
  MOD_RES (11)..(11): Citrulline
  MOD_RES (15)..(15): Citrulline
GYGAGVGGGYXGVSXG

SEQ ID NO: 2959 - protein, 16 aa, Artificial Sequence
  source: /note="Description of Artificial Sequence: Synthetic peptide"
  MOD_RES (3)..(3): Citrulline
  MOD_RES (11)..(11): Citrulline
GFXGNSGGDYXGPSGG

SEQ ID NO: 2960 - protein, 16 aa, Artificial Sequence
  source: /note="Description of Artificial Sequence: Synthetic peptide"
  MOD_RES (7)..(7): Citrulline
  MOD_RES (14)..(14): Citrulline
NSGGDYXGPSGGYXGS

SEQ ID NO: 2961 - protein, 16 aa, Artificial Sequence
  source: /note="Description of Artificial Sequence: Synthetic peptide"
  MOD_RES (3)..(3): Citrulline
  MOD_RES (10)..(10): Citrulline
DYXGPSGGYXGSGGFQ

SEQ ID NO: 2962 - protein, 16 aa, Artificial Sequence
  source: /note="Description of Artificial Sequence: Synthetic peptide"
  MOD_RES (6)..(6): Citrulline
  MOD_RES (13)..(13): Citrulline
PSGGYXGSGGFQXGGG

SEQ ID NO: 2963 - protein, 16 aa, Artificial Sequence
  source: /note="Description of Artificial Sequence: Synthetic peptide"
  MOD_RES (5)..(5): Citrulline
  MOD_RES (9)..(9): Citrulline
GGFQXGGGXGAYGTGY

SEQ ID NO: 2964 - protein, 16 aa, Artificial Sequence
  source: /note="Description of Artificial Sequence: Synthetic peptide"
  MOD_RES (1)..(1): Citrulline
  MOD_RES (5)..(5): Citrulline
XGGGXGAYGTGYFGQG

SEQ ID NO: 2965 - protein, 16 aa, Artificial Sequence
  source: /note="Description of Artificial Sequence: Synthetic peptide"
  MOD_RES (1)..(1): Citrulline
  MOD_RES (13)..(13): Citrulline
XGAYGTGYFGQGXGGG

SEQ ID NO: 2966 - protein, 14 aa, Artificial Sequence
  source: /note="Description of Artificial Sequence: Synthetic peptide"
  MOD_RES (9)..(9): Citrulline
GTGYFGQGXGGGGY

SEQ ID NO: 2967 - protein, 16 aa, Artificial Sequence
  source: /note="Description of Artificial Sequence: Synthetic peptide"
  MOD_RES (14)..(14): Citrulline
NDSDSSSYSSASTXGT

SEQ ID NO: 2968 - protein, 16 aa, Artificial Sequence
  source: /note="Description of Artificial Sequence: Synthetic peptide"
  MOD_RES (10)..(10): Citrulline
SSSYSSASTXGTYGIL

SEQ ID NO: 2969 - protein, 16 aa, Artificial Sequence
  source: /note="Description of Artificial Sequence: Synthetic peptide"
  MOD_RES (10)..(10): Citrulline
VTLGLLPGAXGTQLLP

SEQ ID NO: 2970 - protein, 16 aa, Artificial Sequence
  source: /note="Description of Artificial Sequence: Synthetic peptide"
  MOD_RES (6)..(6): Citrulline
  MOD_RES (13)..(13): Citrulline
LLPGAXGTQLLPXLTG

SEQ ID NO: 2971 - protein, 16 aa, Artificial Sequence
  source: /note="Description of Artificial Sequence: Synthetic peptide"
  MOD_RES (11)..(11): Citrulline
CCPFALGGPAXGSAGA

SEQ ID NO: 2972 - protein, 16 aa, Artificial Sequence
  source: /note="Description of Artificial Sequence: Synthetic peptide"
  MOD_RES (7)..(7): Citrulline
ALGGPAXGSAGAAGGP

SEQ ID NO: 2973 - protein, 16 aa, Artificial Sequence
  source: /note="Description of Artificial Sequence: Synthetic peptide"
  MOD_RES (3)..(3): Citrulline
PAXGSAGAAGGPATAE

SEQ ID NO: 2974 - protein, 16 aa, Artificial Sequence
  source: /note="Description of Artificial Sequence: Synthetic peptide"
  MOD_RES (11)..(11): Citrulline
VHLKIGIGPQXGKLLE

SEQ ID NO: 2975 - protein, 16 aa, Artificial Sequence
  source: /note="Description of Artificial Sequence: Synthetic peptide"
  MOD_RES (7)..(7): Citrulline
IGIGPQXGKLLEKMSS

SEQ ID NO: 2976 - protein, 16 aa, Artificial Sequence
  source: /note="Description of Artificial Sequence: Synthetic peptide"
  MOD_RES (2)..(2): Citrulline
  MOD_RES (11)..(11): Citrulline
KXYHSLGNISXGGSGG

SEQ ID NO: 2977 - protein, 16 aa, Artificial Sequence
  source: /note="Description of Artificial Sequence: Synthetic peptide"
  MOD_RES (7)..(7): Citrulline
SLGNISXGGSGGSGSG

SEQ ID NO: 2978 - protein, 16 aa, Artificial Sequence
  source: /note="Description of Artificial Sequence: Synthetic peptide"
  MOD_RES (3)..(3): Citrulline
ISXGGSGGSGSGGEKP

SEQ ID NO: 2979 - protein, 16 aa, Artificial Sequence
  source: /note="Description of Artificial Sequence: Synthetic peptide"
  MOD_RES (8)..(8): Citrulline
  MOD_RES (10)..(10): Citrulline
GECNPDLXLXGHQKEG

SEQ ID NO: 2980 - protein, 16 aa, Artificial Sequence
  source: /note="Description of Artificial Sequence: Synthetic peptide"
  MOD_RES (4)..(4): Citrulline
  MOD_RES (6)..(6): Citrulline
PDLXLXGHQKEGYGLS

SEQ ID NO: 2981 - protein, 16 aa, Artificial Sequence
  source: /note="Description of Artificial Sequence: Synthetic peptide"
  MOD_RES (2)..(2): Citrulline
LXGHQKEGYGLSWNPN

SEQ ID NO: 2982 - protein, 16 aa, Artificial Sequence
  source: /note="Description of Artificial Sequence: Synthetic peptide"
  MOD_RES (8)..(8): Citrulline
IETGINLXGAIQTKIY

SEQ ID NO: 2983 - protein, 16 aa, Artificial Sequence
  source: /note="Description of Artificial Sequence: Synthetic peptide"
  MOD_RES (4)..(4): Citrulline
INLXGAIQTKIYNKIM

SEQ ID NO: 2984 - protein, 16 aa, Artificial Sequence
  source: /note="Description of Artificial Sequence: Synthetic peptide"
  MOD_RES (6)..(6): Citrulline
  MOD_RES (9)..(9): Citrulline
SNITIXIPXGQLTMIV

SEQ ID NO: 2985 - protein, 16 aa, Artificial Sequence
  source: /note="Description of Artificial Sequence: Synthetic peptide"
  MOD_RES (2)..(2): Citrulline
  MOD_RES (5)..(5): Citrulline
IXIPXGQLTMIVGQVG

SEQ ID NO: 2986 - protein, 16 aa, Artificial Sequence
  source: /note="Description of Artificial Sequence: Synthetic peptide"
  MOD_RES (9)..(9): Citrulline
ADLVIVLKXGAILEFD

SEQ ID NO: 2987 - protein, 16 aa, Artificial Sequence
  source: /note="Description of Artificial Sequence: Synthetic peptide"
  MOD_RES (5)..(5): Citrulline
IVLKXGAILEFDKPEK

SEQ ID NO: 2988 - protein, 16 aa, Artificial Sequence
  source: /note="Description of Artificial Sequence: Synthetic peptide"
  MOD_RES (11)..(11): Citrulline
NNNIYVTGGSXGTKTD

SEQ ID NO: 2989 - protein, 16 aa, Artificial Sequence
  source: /note="Description of Artificial Sequence: Synthetic peptide"
  MOD_RES (7)..(7): Citrulline
YVTGGSXGTKTDTWST

SEQ ID NO: 2990 - protein, 16 aa, Artificial Sequence
  source: /note="Description of Artificial Sequence: Synthetic peptide"
  MOD_RES (3)..(3): Citrulline
GSXGTKTDTWSTTQAW

SEQ ID NO: 2991 - protein, 16 aa, Artificial Sequence
  source: /note="Description of Artificial Sequence: Synthetic peptide"
  MOD_RES (8)..(8): Citrulline
NFVQGKIXGLIAEEGK

SEQ ID NO: 2992 - protein, 16 aa, Artificial Sequence
  source: /note="Description of Artificial Sequence: Synthetic peptide"
  MOD_RES (4)..(4): Citrulline
GKIXGLIAEEGKHCFA

SEQ ID NO: 2993 - protein, 16 aa, Artificial Sequence
  source: /note="Description of Artificial Sequence: Synthetic peptide"
  MOD_RES (11)..(11): Citrulline
PASTGINTGIXGELPI

SEQ ID NO: 2994 - protein, 16 aa, Artificial Sequence
  source: /note="Description of Artificial Sequence: Synthetic peptide"
  MOD_RES (7)..(7): Citrulline
GINTGIXGELPIKVHQ

SEQ ID NO: 2995 - protein, 16 aa, Artificial Sequence
  source: /note="Description of Artificial Sequence: Synthetic peptide"
  MOD_RES (3)..(3): Citrulline
GIXGELPIKVHQGLLA

SEQ ID NO: 2996 - protein, 16 aa, Artificial Sequence
  source: /note="Description of Artificial Sequence: Synthetic peptide"
  MOD_RES (10)..(10): Citrulline
SSFEKWEIAXGNTPGV

SEQ ID NO: 2997 - protein, 16 aa, Artificial Sequence
  source: /note="Description of Artificial Sequence: Synthetic peptide"
  MOD_RES (6)..(6): Citrulline
KWEIAXGNTPGVPLAY

SEQ ID NO: 2998 - protein, 16 aa, Artificial Sequence
  source: /note="Description of Artificial Sequence: Synthetic peptide"
  MOD_RES (13)..(13): Citrulline
TSLDLSWNNFHTXGAV

SEQ ID NO: 2999 - protein, 16 aa, Artificial Sequence
  source: /note="Description of Artificial Sequence: Synthetic peptide"
  MOD_RES (9)..(9): Citrulline
LSWNNFHTXGAVALCN

SEQ ID NO: 3000 - protein, 16 aa, Artificial Sequence
  source: /note="Description of Artificial Sequence: Synthetic peptide"
  MOD_RES (5)..(5): Citrulline
  MOD_RES (15)..(15): Citrulline
NFHTXGAVALCNGLXG

SEQ ID NO: 3001 - protein, 16 aa, Artificial Sequence
  source: /note="Description of Artificial Sequence: Synthetic peptide"
  MOD_RES (1)..(1): Citrulline
  MOD_RES (11)..(11): Citrulline
XGAVALCNGLXGNVTL

SEQ ID NO: 3002 - protein, 16 aa, Artificial Sequence
  source: /note="Description of Artificial Sequence: Synthetic peptide"
  MOD_RES (6)..(6): Citrulline
  MOD_RES (9)..(9): Citrulline
TTLSEXASXGSFHVSQ

SEQ ID NO: 3003 - protein, 16 aa, Artificial Sequence
  source: /note="Description of Artificial Sequence: Synthetic peptide"
  MOD_RES (9)..(9): Citrulline
SAEEEVTGXGSQVEAF

SEQ ID NO: 3004 - protein, 16 aa, Artificial Sequence
  source: /note="Description of Artificial Sequence: Synthetic peptide"
  MOD_RES (5)..(5): Citrulline
  MOD_RES (15)..(15): Citrulline
EVTGXGSQVEAFESXE

SEQ ID NO: 3005 - protein, 16 aa, Artificial Sequence
  source: /note="Description of Artificial Sequence: Synthetic peptide"
  MOD_RES (11)..(12): Citrulline
EDESDVSLYGXXGNHI

SEQ ID NO: 3006 - protein, 16 aa, Artificial Sequence
  source: /note="Description of Artificial Sequence: Synthetic peptide"
  MOD_RES (7)..(8): Citrulline
DVSLYGXXGNHIVNDV

SEQ ID NO: 3007 - protein, 16 aa, Artificial Sequence
  source: /note="Description of Artificial Sequence: Synthetic peptide"
  MOD_RES (3)..(4): Citrulline
YGXXGNHIVNDVGINV

SEQ ID NO: 3008 - protein, 16 aa, Artificial Sequence
  source: /note="Description of Artificial Sequence: Synthetic peptide"
  MOD_RES (11)..(11): Citrulline
AILPAPVNVGXGSSMG

SEQ ID NO: 3009 - protein, 16 aa, Artificial Sequence
  source: /note="Description of Artificial Sequence: Synthetic peptide"
  MOD_RES (7)..(7): Citrulline
  MOD_RES (15)..(15): Citrulline
APVNVGXGSSMGLPXA

SEQ ID NO: 3010 - protein, 16 aa, Artificial Sequence
  source: /note="Description of Artificial Sequence: Synthetic peptide"
  MOD_RES (10)..(10): Citrulline
IAPFFPPLMXGAVVVN

SEQ ID NO: 3011 - protein, 16 aa, Artificial Sequence
  source: /note="Description of Artificial Sequence: Synthetic peptide"
  MOD_RES (6)..(6): Citrulline
FPPLMXGAVVVNTEKD

SEQ ID NO: 3012 - protein, 16 aa, Artificial Sequence
  source: /note="Description of Artificial Sequence: Synthetic peptide"
  MOD_RES (11)..(11): Citrulline
  MOD_RES (16)..(16): Citrulline
QVVCGSKYLVXGESAX

SEQ ID NO: 3013 - protein, 16 aa, Artificial Sequence
  source: /note="Description of Artificial Sequence: Synthetic peptide"
  MOD_RES (7)..(7): Citrulline
  MOD_RES (12)..(12): Citrulline
GSKYLVXGESAXDHVD

SEQ ID NO: 3014 - protein, 16 aa, Artificial Sequence
  source: /note="Description of Artificial Sequence: Synthetic peptide"
  MOD_RES (10)..(10): Citrulline
  MOD_RES (15)..(15): Citrulline
HTALSPLQFXGTPGXG

SEQ ID NO: 3015 - protein, 16 aa, Artificial Sequence
  source: /note="Description of Artificial Sequence: Synthetic peptide"
  MOD_RES (6)..(6): Citrulline
  MOD_RES (11)..(11): Citrulline
SPLQFXGTPGXGSSPA

SEQ ID NO: 3016 - protein, 16 aa, Artificial Sequence
  source: /note="Description of Artificial Sequence: Synthetic peptide"
  MOD_RES (2)..(2): Citrulline
  MOD_RES (7)..(7): Citrulline
FXGTPGXGSSPASPVY

SEQ ID NO: 3017 - protein, 15 aa, Artificial Sequence
  source: /note="Description of Artificial Sequence: Synthetic peptide"
  MOD_RES (13)..(13): Citrulline
GSSGSSSSSSNGXGS

SEQ ID NO: 3018 - protein, 16 aa, Artificial Sequence
  source: /note="Description of Artificial Sequence: Synthetic peptide"
  MOD_RES (9)..(9): Citrulline
SSSSSSNGXGSSSGAV

SEQ ID NO: 3019 - protein, 16 aa, Artificial Sequence
  source: /note="Description of Artificial Sequence: Synthetic peptide"
  MOD_RES (5)..(5): Citrulline
SSNGXGSSSGAVDPSV

SEQ ID NO: 3020 - protein, 16 aa, Artificial Sequence
  source: /note="Description of Artificial Sequence: Synthetic peptide"
  MOD_RES (14)..(14): Citrulline
GHDASVLKVAFVSXGT

SEQ ID NO: 3021 - protein, 16 aa, Artificial Sequence
  source: /note="Description of Artificial Sequence: Synthetic peptide"
  MOD_RES (10)..(10): Citrulline
SVLKVAFVSXGTQLLS

SEQ ID NO: 3022 - protein, 16 aa, Artificial Sequence
  source: /note="Description of Artificial Sequence: Synthetic peptide"
  MOD_RES (6)..(6): Citrulline
VAFVSXGTQLLSSGSD

SEQ ID NO: 3023 - protein, 16 aa, Artificial Sequence
  source: /note="Description of Artificial Sequence: Synthetic peptide"
  MOD_RES (2)..(2): Citrulline
SXGTQLLSSGSDGLVK

SEQ ID NO: 3024 - protein, 16 aa, Artificial Sequence
  source: /note="Description of Artificial Sequence: Synthetic peptide"
  MOD_RES (10)..(11): Citrulline
LTQTYDLIEXXGTKGI

SEQ ID NO: 3025 - protein, 16 aa, Artificial Sequence
  source: /note="Description of Artificial Sequence: Synthetic peptide"
  MOD_RES (6)..(7): Citrulline
YDLIEXXGTKGISQAE

SEQ ID NO: 3026 - protein, 16 aa, Artificial Sequence
  source: /note="Description of Artificial Sequence: Synthetic peptide"
  MOD_RES (13)..(13): Citrulline
IQLTPGGGPLSLXGAL

SEQ ID NO: 3027 - protein, 16 aa, Artificial Sequence
  source: /note="Description of Artificial Sequence: Synthetic peptide"
  MOD_RES (9)..(9): Citrulline
PGGGPLSLXGALSLED

SEQ ID NO: 3028 - protein, 16 aa, Artificial Sequence
  source: /note="Description of Artificial Sequence: Synthetic peptide"
  MOD_RES (5)..(5): Citrulline
PLSLXGALSLEDQAQM

SEQ ID NO: 3029 - protein, 16 aa, Artificial Sequence
  source: /note="Description of Artificial Sequence: Synthetic peptide"
  MOD_RES (1)..(1): Citrulline
  MOD_RES (7)..(7): Citrulline
XSNEVLXGAIETYQEV

SEQ ID NO: 3030 - protein, 16 aa, Artificial Sequence
  source: /note="Description of Artificial Sequence: Synthetic peptide"
  MOD_RES (3)..(3): Citrulline
VLXGAIETYQEVASLP

SEQ ID NO: 3031 - protein, 16 aa, Artificial Sequence
  source: /note="Description of Artificial Sequence: Synthetic peptide"
  MOD_RES (12)..(12): Citrulline
FACQCPPGYQKXGEQC

SEQ ID NO: 3032 - protein, 16 aa, Artificial Sequence
  source: /note="Description of Artificial Sequence: Synthetic peptide"
  MOD_RES (8)..(8): Citrulline
CPPGYQKXGEQCVDID

SEQ ID NO: 3033 - protein, 16 aa, Artificial Sequence
  source: /note="Description of Artificial Sequence: Synthetic peptide"
  MOD_RES (9)..(9): Citrulline
  MOD_RES (14)..(14): Citrulline
ASTNVNFSXGASTXAG

SEQ ID NO: 3034 - protein, 16 aa, Artificial Sequence
  source: /note="Description of Artificial Sequence: Synthetic peptide"
  MOD_RES (5)..(5): Citrulline
  MOD_RES (10)..(10): Citrulline
VNFSXGASTXAGFSDG

SEQ ID NO: 3035 - protein, 16 aa, Artificial Sequence
  source: /note="Description of Artificial Sequence: Synthetic peptide"
  MOD_RES (10)..(10): Citrulline
ITEDLTNKAXGSNKSF

SEQ ID NO: 3036 - protein, 16 aa, Artificial Sequence
  source: /note="Description of Artificial Sequence: Synthetic peptide"
  MOD_RES (8)..(8): Citrulline
QVMTQIIXGQPVSTAV

SEQ ID NO: 3037 - protein, 16 aa, Artificial Sequence
  source: /note="Description of Artificial Sequence: Synthetic peptide"
  MOD_RES (4)..(4): Citrulline
QIIXGQPVSTAVSAPN

SEQ ID NO: 3038 - protein, 16 aa, Artificial Sequence
  source: /note="Description of Artificial Sequence: Synthetic peptide"
  MOD_RES (10)..(10): Citrulline
ILSSADYVEXGQEHVK

SEQ ID NO: 3039 - protein, 16 aa, Artificial Sequence
  source: /note="Description of Artificial Sequence: Synthetic peptide"
  MOD_RES (6)..(6): Citrulline
ADYVEXGQEHVKTALE

SEQ ID NO: 3040 - protein, 16 aa, Artificial Sequence
  source: /note="Description of Artificial Sequence: Synthetic peptide"
  MOD_RES (4)..(5): Citrulline
DGKXXGDALIEMESEQ

SEQ ID NO: 3041 - protein, 16 aa, Artificial Sequence
  source: /note="Description of Artificial Sequence: Synthetic peptide"
  MOD_RES (1)..(1): Citrulline
XGDALIEMESEQDVQK

SEQ ID NO: 3042 - protein, 16 aa, Artificial Sequence
  source: /note="Description of Artificial Sequence: Synthetic peptide"
  MOD_RES (9)..(9): Citrulline
  MOD_RES (11)..(11): Citrulline
PVVNDGVVXLXGLPYS

SEQ ID NO: 3043 - protein, 16 aa, Artificial Sequence
  source: /note="Description of Artificial Sequence: Synthetic peptide"
  MOD_RES (5)..(5): Citrulline
  MOD_RES (7)..(7): Citrulline
DGVVXLXGLPYSCNEK

SEQ ID NO: 3044 - protein, 16 aa, Artificial Sequence
  source: /note="Description of Artificial Sequence: Synthetic peptide"
  MOD_RES (1)..(1): Citrulline
  MOD_RES (3)..(3): Citrulline
XLXGLPYSCNEKDIVD

SEQ ID NO: 3045 - protein, 16 aa, Artificial Sequence
  source: /note="Description of Artificial Sequence: Synthetic peptide"
  MOD_RES (10)..(10): Citrulline
PGLLKPHPSXGLLHGN

SEQ ID NO: 3046 - protein, 16 aa, Artificial Sequence
  source: /note="Description of Artificial Sequence: Synthetic peptide"
  MOD_RES (6)..(6): Citrulline
KPHPSXGLLHGNTMEK

SEQ ID NO: 3047 - protein, 16 aa, Artificial Sequence
  source: /note="Description of Artificial Sequence: Synthetic peptide"
  MOD_RES (9)..(9): Citrulline
  MOD_RES (11)..(11): Citrulline
LLSAALGSXGXGATGG

SEQ ID NO: 3048 - protein, 16 aa, Artificial Sequence
  source: /note="Description of Artificial Sequence: Synthetic peptide"
  MOD_RES (5)..(5): Citrulline
  MOD_RES (7)..(7): Citrulline
ALGSXGXGATGGAGDP

SEQ ID NO: 3049 - protein, 16 aa, Artificial Sequence
  source: /note="Description of Artificial Sequence: Synthetic peptide"
  MOD_RES (11)..(11): Citrulline
  MOD_RES (15)..(15): Citrulline
PEGLDISYSLXGDTXG

SEQ ID NO: 3050 - protein, 16 aa, Artificial Sequence
  source: /note="Description of Artificial Sequence: Synthetic peptide"
  MOD_RES (7)..(7): Citrulline
  MOD_RES (11)..(11): Citrulline
DISYSLXGDTXGWLKI

SEQ ID NO: 3051 - protein, 16 aa, Artificial Sequence
  source: /note="Description of Artificial Sequence: Synthetic peptide"
  MOD_RES (3)..(3): Citrulline
  MOD_RES (7)..(7): Citrulline
SLXGDTXGWLKIDHVT

SEQ ID NO: 3052 - protein, 16 aa, Artificial Sequence
  source: /note="Description of Artificial Sequence: Synthetic peptide"
  MOD_RES (13)..(13): Citrulline
NYNCEICGNYTYXGPK

SEQ ID NO: 3053 - protein, 16 aa, Artificial Sequence
  source: /note="Description of Artificial Sequence: Synthetic peptide"
  MOD_RES (9)..(9): Citrulline
  MOD_RES (16)..(16): Citrulline
EICGNYTYXGPKAFQX

SEQ ID NO: 3054 - protein, 16 aa, Artificial Sequence
  source: /note="Description of Artificial Sequence: Synthetic peptide"
  MOD_RES (4)..(4): Citrulline
  MOD_RES (11)..(11): Citrulline
SPKXAADFIQXGSLIM

SEQ ID NO: 3055 - protein, 16 aa, Artificial Sequence
  source: /note="Description of Artificial Sequence: Synthetic peptide"
  MOD_RES (7)..(7): Citrulline
AADFIQXGSLIMDMVS

SEQ ID NO: 3056 - protein, 16 aa, Artificial Sequence
  source: /note="Description of Artificial Sequence: Synthetic peptide"
  MOD_RES (3)..(3): Citrulline
IQXGSLIMDMVSDKGN

SEQ ID NO: 3057 - protein, 16 aa, Artificial Sequence
  source: /note="Description of Artificial Sequence: Synthetic peptide"
  MOD_RES (5)..(5): Citrulline
  MOD_RES (8)..(8): Citrulline
NVSPXIIXGTTSGPMY

SEQ ID NO: 3058 - protein, 16 aa, Artificial Sequence
  source: /note="Description of Artificial Sequence: Synthetic peptide"
  MOD_RES (1)..(1): Citrulline
  MOD_RES (4)..(4): Citrulline
XIIXGTTSGPMYGPGQ

SEQ ID NO: 3059 - protein, 16 aa, Artificial Sequence
  source: /note="Description of Artificial Sequence: Synthetic peptide"
  MOD_RES (3)..(3): Citrulline
  MOD_RES (11)..(11): Citrulline
VSXTTPYEPKXGVPLS

SEQ ID NO: 3060 - protein, 16 aa, Artificial Sequence
  source: /note="Description of Artificial Sequence: Synthetic peptide"
  MOD_RES (7)..(7): Citrulline
TPYEPKXGVPLSVNPV

SEQ ID NO: 3061 - protein, 16 aa, Artificial Sequence
  source: /note="Description of Artificial Sequence: Synthetic peptide"
  MOD_RES (7)..(7): Citrulline
PPTTPIXGNLLHFPSS

SEQ ID NO: 3062 - protein, 16 aa, Artificial Sequence
  source: /note="Description of Artificial Sequence: Synthetic peptide"
  MOD_RES (3)..(3): Citrulline
PIXGNLLHFPSSQGEE

SEQ ID NO: 3063 - protein, 16 aa, Artificial Sequence
  source: /note="Description of Artificial Sequence: Synthetic peptide"
  MOD_RES (11)..(11): Citrulline
GKCENMTITPXGTTVT

SEQ ID NO: 3064 - protein, 16 aa, Artificial Sequence
  source: /note="Description of Artificial Sequence: Synthetic peptide"
  MOD_RES (7)..(7): Citrulline
NMTITPXGTTVTPTKE

SEQ ID NO: 3065 - protein, 16 aa, Artificial Sequence
  source: /note="Description of Artificial Sequence: Synthetic peptide"
  MOD_RES (1)..(1): Citrulline
  MOD_RES (11)..(11): Citrulline
XSLNLQAESVXGFNMG

SEQ ID NO: 3066 - protein, 16 aa, Artificial Sequence
  source: /note="Description of Artificial Sequence: Synthetic peptide"
  MOD_RES (7)..(7): Citrulline
  MOD_RES (13)..(13): Citrulline
LQAESVXGFNMGXAIS

SEQ ID NO: 3067 - protein, 16 aa, Artificial Sequence
  source: /note="Description of Artificial Sequence: Synthetic peptide"
  MOD_RES (6)..(6): Citrulline
  MOD_RES (10)..(10): Citrulline
DHHWSXGTLXHISENS

SEQ ID NO: 3068 - protein, 16 aa, Artificial Sequence
  source: /note="Description of Artificial Sequence: Synthetic peptide"
  MOD_RES (2)..(2): Citrulline
  MOD_RES (6)..(6): Citrulline
SXGTLXHISENSFGPS

SEQ ID NO: 3069 - protein, 16 aa, Artificial Sequence
  source: /note="Description of Artificial Sequence: Synthetic peptide"
  MOD_RES (12)..(12): Citrulline
DGYAFSSNIYTXGSHL

SEQ ID NO: 3070 - protein, 16 aa, Artificial Sequence
  source: /note="Description of Artificial Sequence: Synthetic peptide"
  MOD_RES (8)..(8): Citrulline
FSSNIYTXGSHLDQGE

SEQ ID NO: 3071 - protein, 16 aa, Artificial Sequence
  source: /note="Description of Artificial Sequence: Synthetic peptide"
  MOD_RES (4)..(4): Citrulline
IYTXGSHLDQGEAAVA

SEQ ID NO: 3072 - protein, 16 aa, Artificial Sequence
  source: /note="Description of Artificial Sequence: Synthetic peptide"
  MOD_RES (10)..(10): Citrulline
ANMVKLLLDXGAKIDA

SEQ ID NO: 3073 - protein, 16 aa, Artificial Sequence
  source: /note="Description of Artificial Sequence: Synthetic peptide"
  MOD_RES (6)..(6): Citrulline
  MOD_RES (15)..(15): Citrulline
KLLLDXGAKIDAKTXD

SEQ ID NO: 3074 - protein, 16 aa, Artificial Sequence
  source: /note="Description of Artificial Sequence: Synthetic peptide"
  MOD_RES (2)..(2): Citrulline
  MOD_RES (11)..(11): Citrulline
DXGAKIDAKTXDGLTP

SEQ ID NO: 3075 - protein, 16 aa, Artificial Sequence
  source: /note="Description of Artificial Sequence: Synthetic peptide"
  MOD_RES (5)..(5): Citrulline
  MOD_RES (15)..(15): Citrulline
TTNVXGETALHMAAXS

SEQ ID NO: 3076 - protein, 16 aa, Artificial Sequence
  source: /note="Description of Artificial Sequence: Synthetic peptide"
  MOD_RES (11)..(11): Citrulline
EMYVYQKDLSXGDINL

SEQ ID NO: 3077 - protein, 16 aa, Artificial Sequence
  source: /note="Description of Artificial Sequence: Synthetic peptide"
  MOD_RES (7)..(7): Citrulline
YQKDLSXGDINLKDFL

SEQ ID NO: 3078 - protein, 16 aa, Artificial Sequence
  source: /note="Description of Artificial Sequence: Synthetic peptide"
  MOD_RES (3)..(3): Citrulline
LSXGDINLKDFLPEKH

SEQ ID NO: 3079 - protein, 16 aa, Artificial Sequence
  source: /note="Description of Artificial Sequence: Synthetic peptide"
  MOD_RES (13)..(13): Citrulline
IISQECKTVQETXGTF

SEQ ID NO: 3080 - protein, 16 aa, Artificial Sequence
  source: /note="Description of Artificial Sequence: Synthetic peptide"
  MOD_RES (9)..(9): Citrulline
  MOD_RES (16)..(16): Citrulline
ECKTVQETXGTFYTTX

SEQ ID NO: 3081 - protein, 16 aa, Artificial Sequence
  source: /note="Description of Artificial Sequence: Synthetic peptide"
  MOD_RES (5)..(5): Citrulline
  MOD_RES (12)..(12): Citrulline
VQETXGTFYTTXQQKQ

SEQ ID NO: 3082 - protein, 16 aa, Artificial Sequence
  source: /note="Description of Artificial Sequence: Synthetic peptide"
  MOD_RES (1)..(1): Citrulline
  MOD_RES (8)..(8): Citrulline
XGTFYTTXQQKQPPSP

SEQ ID NO: 3083 - protein, 16 aa, Artificial Sequence
  source: /note="Description of Artificial Sequence: Synthetic peptide"
  MOD_RES (6)..(6): Citrulline
PGHSPXGSVTEDTWLN

SEQ ID NO: 3084 - protein, 16 aa, Artificial Sequence
  source: /note="Description of Artificial Sequence: Synthetic peptide"
  MOD_RES (9)..(9): Citrulline
AHYETEGSXGAVKAST

SEQ ID NO: 3085 - protein, 16 aa, Artificial Sequence
  source: /note="Description of Artificial Sequence: Synthetic peptide"
  MOD_RES (8)..(8): Citrulline
TQPTLPKXGLFLKEET

SEQ ID NO: 3086 - protein, 16 aa, Artificial Sequence
  source: /note="Description of Artificial Sequence: Synthetic peptide"
  MOD_RES (4)..(4): Citrulline
LPKXGLFLKEETFKND

SEQ ID NO: 3087 - protein, 16 aa, Artificial Sequence
  source: /note="Description of Artificial Sequence: Synthetic peptide"
  MOD_RES (11)..(11): Citrulline
NLTKLLPQKPXGETIQ

SEQ ID NO: 3088 - protein, 16 aa, Artificial Sequence
  source: /note="Description of Artificial Sequence: Synthetic peptide"
  MOD_RES (7)..(7): Citrulline
LLPQKPXGETIQNIDD

SEQ ID NO: 3089 - protein, 16 aa, Artificial Sequence
  source: /note="Description of Artificial Sequence: Synthetic peptide"
  MOD_RES (3)..(3): Citrulline
KPXGETIQNIDDWELS

SEQ ID NO: 3090 - protein, 16 aa, Artificial Sequence
  source: /note="Description of Artificial Sequence: Synthetic peptide"
  MOD_RES (7)..(7): Citrulline
GVLPFVXGVDLSGNDF

SEQ ID NO: 3091 - protein, 16 aa, Artificial Sequence
  source: /note="Description of Artificial Sequence: Synthetic peptide"
  MOD_RES (3)..(3): Citrulline
FVXGVDLSGNDFKGGY

SEQ ID NO: 3092 - protein, 16 aa, Artificial Sequence
  source: /note="Description of Artificial Sequence: Synthetic peptide"
  MOD_RES (6)..(6): Citrulline
  MOD_RES (16)..(16): Citrulline
MCVDAXGDLIVADSSX

SEQ ID NO: 3093 - protein, 16 aa, Artificial Sequence
  source: /note="Description of Artificial Sequence: Synthetic peptide"
  MOD_RES (9)..(9): Citrulline
  MOD_RES (13)..(13): Citrulline
AGSPKQPVXGYYXGAV

SEQ ID NO: 3094 - protein, 16 aa, Artificial Sequence
  source: /note="Description of Artificial Sequence: Synthetic peptide"
  MOD_RES (5)..(5): Citrulline
  MOD_RES (9)..(9): Citrulline
KQPVXGYYXGAVGGTF

SEQ ID NO: 3095 - protein, 16 aa, Artificial Sequence
  source: /note="Description of Artificial Sequence: Synthetic peptide"
  MOD_RES (7)..(7): Citrulline
  MOD_RES (10)..(10): Citrulline
MEMYADXESXGSVLEP

SEQ ID NO: 3096 - protein, 16 aa, Artificial Sequence
  source: /note="Description of Artificial Sequence: Synthetic peptide"
  MOD_RES (3)..(3): Citrulline
  MOD_RES (6)..(6): Citrulline
ADXESXGSVLEPEGTV

SEQ ID NO: 3097 - protein, 16 aa, Artificial Sequence
  source: /note="Description of Artificial Sequence: Synthetic peptide"
  MOD_RES (5)..(5): Citrulline
  MOD_RES (11)..(11): Citrulline
PDKEXKMITIXGSVHQ

SEQ ID NO: 3098 - protein, 16 aa, Artificial Sequence
  source: /note="Description of Artificial Sequence: Synthetic peptide"
  MOD_RES (1)..(1): Citrulline
  MOD_RES (7)..(7): Citrulline
XKMITIXGSVHQNFAD

SEQ ID NO: 3099 - protein, 16 aa, Artificial Sequence
  source: /note="Description of Artificial Sequence: Synthetic peptide"
  MOD_RES (10)..(10): Citrulline
AAGFTKAALXGSAFDP

SEQ ID NO: 3100 - protein, 16 aa, Artificial Sequence
  source: /note="Description of Artificial Sequence: Synthetic peptide"
  MOD_RES (6)..(6): Citrulline
TKAALXGSAFDPLSQS

SEQ ID NO: 3101 - protein, 16 aa, Artificial Sequence
  source: /note="Description of Artificial Sequence: Synthetic peptide"
  MOD_RES (2)..(2): Citrulline
  MOD_RES (13)..(13): Citrulline
LXGSAFDPLSQSXGPA

SEQ ID NO: 3102 - protein, 16 aa, Artificial Sequence
  source: /note="Description of Artificial Sequence: Synthetic peptide"
  MOD_RES (13)..(13): Citrulline
GFDGCGSTYKNAXGMQ

SEQ ID NO: 3103 - protein, 16 aa, Artificial Sequence
  source: /note="Description of Artificial Sequence: Synthetic peptide"
  MOD_RES (9)..(9): Citrulline
  MOD_RES (16)..(16): Citrulline
CGSTYKNAXGMQKHLX

SEQ ID NO: 3104 - protein, 16 aa, Artificial Sequence
  source: /note="Description of Artificial Sequence: Synthetic peptide"
  MOD_RES (8)..(8): Citrulline
  MOD_RES (15)..(15): Citrulline
GGSSWGGXSNSGPYXG

SEQ ID NO: 3105 - protein, 16 aa, Artificial Sequence
  source: /note="Description of Artificial Sequence: Synthetic peptide"
  MOD_RES (4)..(4): Citrulline
  MOD_RES (11)..(11): Citrulline
WGGXSNSGPYXGGYGG

SEQ ID NO: 3106 - protein, 16 aa, Artificial Sequence
  source: /note="Description of Artificial Sequence: Synthetic peptide"
  MOD_RES (7)..(7): Citrulline
SNSGPYXGGYGGGGGY

SEQ ID NO: 3107 - protein, 16 aa, Artificial Sequence
  source: /note="Description of Artificial Sequence: Synthetic peptide"
  MOD_RES (10)..(10): Citrulline
KPSNMLVNTXGQVKLC

SEQ ID NO: 3108 - protein, 16 aa, Artificial Sequence
  source: /note="Description of Artificial Sequence: Synthetic peptide"
  MOD_RES (6)..(6): Citrulline
MLVNTXGQVKLCDFGV

SEQ ID NO: 3109 - protein, 16 aa, Artificial Sequence
  source: /note="Description of Artificial Sequence: Synthetic peptide"
  MOD_RES (2)..(2): Citrulline
TXGQVKLCDFGVSTQL

SEQ ID NO: 3110 - protein, 16 aa, Artificial Sequence
  source: /note="Description of Artificial Sequence: Synthetic peptide"
  MOD_RES (10)..(10): Citrulline
YQKSNFETTXGKNWCA

SEQ ID NO: 3111 - protein, 16 aa, Artificial Sequence
  source: /note="Description of Artificial Sequence: Synthetic peptide"
  MOD_RES (4)..(4): Citrulline
  MOD_RES (6)..(6): Citrulline
VEGXAXGEELAALGKQ

SEQ ID NO: 3112 - protein, 16 aa, Artificial Sequence
  source: /note="Description of Artificial Sequence: Synthetic peptide"
  MOD_RES (2)..(2): Citrulline
AXGEELAALGKQASFS

SEQ ID NO: 3113 - protein, 16 aa, Artificial Sequence
  source: /note="Description of Artificial Sequence: Synthetic peptide"
  MOD_RES (5)..(5): Citrulline
  MOD_RES (12)..(12): Citrulline
ELALXKVGAPSXGALS

SEQ ID NO: 3114 - protein, 16 aa, Artificial Sequence
  source: /note="Description of Artificial Sequence: Synthetic peptide"
  MOD_RES (1)..(1): Citrulline
  MOD_RES (8)..(8): Citrulline
XKVGAPSXGALSPSGS

SEQ ID NO: 3115 - protein, 16 aa, Artificial Sequence
  source: /note="Description of Artificial Sequence: Synthetic peptide"
  MOD_RES (4)..(4): Citrulline
APSXGALSPSGSAKEA

SEQ ID NO: 3116 - protein, 16 aa, Artificial Sequence
  source: /note="Description of Artificial Sequence: Synthetic peptide"
  MOD_RES (4)..(4): Citrulline
  MOD_RES (7)..(7): Citrulline
TAAXLQXGHLLLKQGK

SEQ ID NO: 3117 - protein, 16 aa, Artificial Sequence
  source: /note="Description of Artificial Sequence: Synthetic peptide"
  MOD_RES (3)..(3): Citrulline
LQXGHLLLKQGKLDEA

SEQ ID NO: 3118 - protein, 16 aa, Artificial Sequence
  source: /note="Description of Artificial Sequence: Synthetic peptide"
  MOD_RES (2)..(2): Citrulline
  MOD_RES (9)..(9): Citrulline
GXDSPYQSXGSPHYFS

SEQ ID NO: 3119 - protein, 16 aa, Artificial Sequence
  source: /note="Description of Artificial Sequence: Synthetic peptide"
  MOD_RES (5)..(5): Citrulline
  MOD_RES (15)..(15): Citrulline
PYQSXGSPHYFSPFXP

SEQ ID NO: 3120 - protein, 16 aa, Artificial Sequence
  source: /note="Description of Artificial Sequence: Synthetic peptide"
  MOD_RES (9)..(9): Citrulline
  MOD_RES (11)..(11): Citrulline
QIMKELNKXGXVLVND

SEQ ID NO: 3121 - protein, 16 aa, Artificial Sequence
  source: /note="Description of Artificial Sequence: Synthetic peptide"
  MOD_RES (5)..(5): Citrulline
  MOD_RES (7)..(7): Citrulline
ELNKXGXVLVNDAQKV

SEQ ID NO: 3122 - protein, 16 aa, Artificial Sequence
  source: /note="Description of Artificial Sequence: Synthetic peptide"
  MOD_RES (7)..(7): Citrulline
  MOD_RES (11)..(11): Citrulline
GLGGGMXGPPXGGMVQ

SEQ ID NO: 3123 - protein, 16 aa, Artificial Sequence
  source: /note="Description of Artificial Sequence: Synthetic peptide"
  MOD_RES (3)..(3): Citrulline
  MOD_RES (7)..(7): Citrulline
GMXGPPXGGMVQKPGF

SEQ ID NO: 3124 - protein, 16 aa, Artificial Sequence
  source: /note="Description of Artificial Sequence: Synthetic peptide"
  MOD_RES (3)..(3): Citrulline
  MOD_RES (16)..(16): Citrulline
PPXGGMVQKPGFGVGX

SEQ ID NO: 3125 - protein, 16 aa, Artificial Sequence
  source: /note="Description of Artificial Sequence: Synthetic peptide"
  MOD_RES (10)..(10): Citrulline
SETFESTPIXGALQIE

SEQ ID NO: 3126 - protein, 16 aa, Artificial Sequence
  source: /note="Description of Artificial Sequence: Synthetic peptide"
  MOD_RES (6)..(6): Citrulline
ESTPIXGALQIESSEE

SEQ ID NO: 3127 - protein, 16 aa, Artificial Sequence
  source: /note="Description of Artificial Sequence: Synthetic peptide"
  MOD_RES (2)..(2): Citrulline
IXGALQIESSEETDQG

SEQ ID NO: 3128 - protein, 16 aa, Artificial Sequence
  source: /note="Description of Artificial Sequence: Synthetic peptide"
  MOD_RES (10)..(10): Citrulline
TFYNFVLTNXGSSLGG

SEQ ID NO: 3129 - protein, 16 aa, Artificial Sequence
  source: /note="Description of Artificial Sequence: Synthetic peptide"
  MOD_RES (6)..(6): Citrulline
FVLTNXGSSLGGLQQT

SEQ ID NO: 3130 - protein, 16 aa, Artificial Sequence
  source: /note="Description of Artificial Sequence: Synthetic peptide"
  MOD_RES (6)..(6): Citrulline
  MOD_RES (9)..(9): Citrulline
VMVPLXKSXGGQFLTP

SEQ ID NO: 3131 - protein, 16 aa, Artificial Sequence
  source: /note="Description of Artificial Sequence: Synthetic peptide"
  MOD_RES (2)..(2): Citrulline
  MOD_RES (5)..(5): Citrulline
LXKSXGGQFLTPLGSP

SEQ ID NO: 3132 - protein, 16 aa, Artificial Sequence
  source: /note="Description of Artificial Sequence: Synthetic peptide"
  MOD_RES (7)..(7): Citrulline
HYYEQTXGGQVSVCPL

SEQ ID NO: 3133 - protein, 16 aa, Artificial Sequence
  source: /note="Description of Artificial Sequence: Synthetic peptide"
  MOD_RES (10)..(10): Citrulline
  MOD_RES (12)..(12): Citrulline
GQVSVCPLPXGXVQWQ

SEQ ID NO: 3134 - protein, 16 aa, Artificial Sequence
  source: /note="Description of Artificial Sequence: Synthetic peptide"
  MOD_RES (10)..(10): Citrulline
QGAFLVNTAXGGLVDE

SEQ ID NO: 3135 - protein, 16 aa, Artificial Sequence
  source: /note="Description of Artificial Sequence: Synthetic peptide"
  MOD_RES (6)..(6): Citrulline
LVNTAXGGLVDEKALA

SEQ ID NO: 3136 - protein, 16 aa, Artificial Sequence
  source: /note="Description of Artificial Sequence: Synthetic peptide"
  MOD_RES (7)..(7): Citrulline
  MOD_RES (9)..(9): Citrulline
QALKEGXIXGAALDVH

SEQ ID NO: 3137 - protein, 16 aa, Artificial Sequence
  source: /note="Description of Artificial Sequence: Synthetic peptide"
  MOD_RES (3)..(3): Citrulline
  MOD_RES (5)..(5): Citrulline
EGXIXGAALDVHESEP

SEQ ID NO: 3138 - protein, 16 aa, Artificial Sequence
  source: /note="Description of Artificial Sequence: Synthetic peptide"
  MOD_RES (9)..(9): Citrulline
LLSISTFQXGLKDPNQ

SEQ ID NO: 3139 - protein, 16 aa, Artificial Sequence
  source: /note="Description of Artificial Sequence: Synthetic peptide"
  MOD_RES (5)..(5): Citrulline
  MOD_RES (15)..(15): Citrulline
STFQXGLKDPNQLIXA

SEQ ID NO: 3140 - protein, 16 aa, Artificial Sequence
  source: /note="Description of Artificial Sequence: Synthetic peptide"
  MOD_RES (9)..(10): Citrulline
NVATMSIKXXGMFEPY

SEQ ID NO: 3141 - protein, 16 aa, Artificial Sequence
  source: /note="Description of Artificial Sequence: Synthetic peptide"
  MOD_RES (5)..(6): Citrulline
MSIKXXGMFEPYLKSF

SEQ ID NO: 3142 - protein, 16 aa, Artificial Sequence
  source: /note="Description of Artificial Sequence: Synthetic peptide"
  MOD_RES (12)..(12): Citrulline
FGKYIDIHFNKXGAIE

SEQ ID NO: 3143 - protein, 16 aa, Artificial Sequence
  source: /note="Description of Artificial Sequence: Synthetic peptide"
  MOD_RES (8)..(8): Citrulline
IDIHFNKXGAIEGAKI

SEQ ID NO: 3144 - protein, 16 aa, Artificial Sequence
  source: /note="Description of Artificial Sequence: Synthetic peptide"
  MOD_RES (4)..(4): Citrulline
FNKXGAIEGAKIEQYL

SEQ ID NO: 3145 - protein, 16 aa, Artificial Sequence
  source: /note="Description of Artificial Sequence: Synthetic peptide"
  MOD_RES (13)..(13): Citrulline
TPAGPCSPCWSCXGAK

SEQ ID NO: 3146 - protein, 16 aa, Artificial Sequence
  source: /note="Description of Artificial Sequence: Synthetic peptide"
  MOD_RES (9)..(9): Citrulline
PCSPCWSCXGAKTTAP

SEQ ID NO: 3147 - protein, 16 aa, Artificial Sequence
  source: /note="Description of Artificial Sequence: Synthetic peptide"
  MOD_RES (8)..(8): Citrulline
ITIGNLVXGSKLLCET

SEQ ID NO: 3148 - protein, 16 aa, Artificial Sequence
  source: /note="Description of Artificial Sequence: Synthetic peptide"
  MOD_RES (4)..(4): Citrulline
NLVXGSKLLCETSLGY

SEQ ID NO: 3149 - protein, 16 aa, Artificial Sequence
  source: /note="Description of Artificial Sequence: Synthetic peptide"
  MOD_RES (13)..(13): Citrulline
  MOD_RES (16)..(16): Citrulline
YISQMLTAMSKQXGSX

SEQ ID NO: 3150 - protein, 16 aa, Artificial Sequence
  source: /note="Description of Artificial Sequence: Synthetic peptide"
  MOD_RES (8)..(8): Citrulline
  MOD_RES (10)..(10): Citrulline
AEQMPEYXGXATLVQD

SEQ ID NO: 3151 - protein, 16 aa, Artificial Sequence
  source: /note="Description of Artificial Sequence: Synthetic peptide"
  MOD_RES (4)..(4): Citrulline
  MOD_RES (6)..(6): Citrulline
PEYXGXATLVQDGIAK

SEQ ID NO: 3152 - protein, 16 aa, Artificial Sequence
  source: /note="Description of Artificial Sequence: Synthetic peptide"
  MOD_RES (12)..(12): Citrulline
AAELLAKQFCTXGSPQ

SEQ ID NO: 3153 - protein, 16 aa, Artificial Sequence
  source: /note="Description of Artificial Sequence: Synthetic peptide"
  MOD_RES (8)..(8): Citrulline
LAKQFCTXGSPQETTV

SEQ ID NO: 3154 - protein, 16 aa, Artificial Sequence
  source: /note="Description of Artificial Sequence: Synthetic peptide"
  MOD_RES (9)..(9): Citrulline
AALACWGVXGSLLSEA

SEQ ID NO: 3155 - protein, 16 aa, Artificial Sequence
  source: /note="Description of Artificial Sequence: Synthetic peptide"
  MOD_RES (5)..(5): Citrulline
  MOD_RES (15)..(15): Citrulline
CWGVXGSLLSEADVXA

SEQ ID NO: 3156 - protein, 16 aa, Artificial Sequence
  source: /note="Description of Artificial Sequence: Synthetic peptide"
  MOD_RES (9)..(9): Citrulline
  MOD_RES (14)..(14): Citrulline
PQVATLIDXFVKGXGQ

SEQ ID NO: 3157 - protein, 16 aa, Artificial Sequence
  source: /note="Description of Artificial Sequence: Synthetic peptide"
  MOD_RES (5)..(5): Citrulline
  MOD_RES (10)..(10): Citrulline
TLIDXFVKGXGQLDKD

SEQ ID NO: 3158 - protein, 16 aa, Artificial Sequence
  source: /note="Description of Artificial Sequence: Synthetic peptide"
  MOD_RES (1)..(1): Citrulline
  MOD_RES (6)..(6): Citrulline
XFVKGXGQLDKDTLDT

SEQ ID NO: 3159 - protein, 16 aa, Artificial Sequence
  source: /note="Description of Artificial Sequence: Synthetic peptide"
  MOD_RES (3)..(3): Citrulline
  MOD_RES (8)..(8): Citrulline
PQXALLAXGTKQASAL

SEQ ID NO: 3160 - protein, 16 aa, Artificial Sequence
  source: /note="Description of Artificial Sequence: Synthetic peptide"
  MOD_RES (4)..(4): Citrulline
LLAXGTKQASALSFPA

SEQ ID NO: 3161 - protein, 16 aa, Artificial Sequence
  source: /note="Description of Artificial Sequence: Synthetic peptide"
  MOD_RES (6)..(6): Citrulline
AVELWXGKKLVAAASP

SEQ ID NO: 3162 - protein, 16 aa, Artificial Sequence
  source: /note="Description of Artificial Sequence: Synthetic peptide"
  MOD_RES (2)..(2): Citrulline
WXGKKLVAAASPSAML

SEQ ID NO: 3163 - protein, 16 aa, Artificial Sequence
  source: /note="Description of Artificial Sequence: Synthetic peptide"
  MOD_RES (9)..(9): Citrulline
QSLLDEFTXGYTKNDF

SEQ ID NO: 3164 - protein, 16 aa, Artificial Sequence
  source: /note="Description of Artificial Sequence: Synthetic peptide"
  MOD_RES (5)..(5): Citrulline
DEFTXGYTKNDFEPVK

SEQ ID NO: 3165 - protein, 16 aa, Artificial Sequence
  source: /note="Description of Artificial Sequence: Synthetic peptide"
  MOD_RES (12)..(12): Citrulline
AEDYEVVKVIGXGAFG

SEQ ID NO: 3166 - protein, 16 aa, Artificial Sequence
  source: /note="Description of Artificial Sequence: Synthetic peptide"
  MOD_RES (8)..(8): Citrulline
EVVKVIGXGAFGEVQL

SEQ ID NO: 3167 - protein, 16 aa, Artificial Sequence
  source: /note="Description of Artificial Sequence: Synthetic peptide"
  MOD_RES (7)..(7): Citrulline
  MOD_RES (13)..(13): Citrulline
AQSILEXGGPTPXNGN

SEQ ID NO: 3168 - protein, 16 aa, Artificial Sequence
  source: /note="Description of Artificial Sequence: Synthetic peptide"
  MOD_RES (2)..(2): Citrulline
  MOD_RES (9)..(9): Citrulline
DXGASVQWXGLDTSLG

SEQ ID NO: 3169 - protein, 16 aa, Artificial Sequence
  source: /note="Description of Artificial Sequence: Synthetic peptide"
  MOD_RES (8)..(8): Citrulline
VSAWAGLXGTGQVGIS

SEQ ID NO: 3170 - protein, 14 aa, Artificial Sequence
  source: /note="Description of Artificial Sequence: Synthetic peptide"
  MOD_RES (4)..(4): Citrulline
AGLXGTGQVGISPS

SEQ ID NO: 3171 - protein, 16 aa, Artificial Sequence
  source: /note="Description of Artificial Sequence: Synthetic peptide"
  MOD_RES (8)..(8): Citrulline
PPKPTQAXGKPLLLSA

SEQ ID NO: 3172 - protein, 16 aa, Artificial Sequence
  source: /note="Description of Artificial Sequence: Synthetic peptide"
  MOD_RES (4)..(4): Citrulline
TQAXGKPLLLSAPGGQ

SEQ ID NO: 3173 - protein, 16 aa, Artificial Sequence
  source: /note="Description of Artificial Sequence: Synthetic peptide"
  MOD_RES (10)..(10): Citrulline
VAFDFTKVKXGADGVM

SEQ ID NO: 3174 - protein, 16 aa, Artificial Sequence
  source: /note="Description of Artificial Sequence: Synthetic peptide"
  MOD_RES (6)..(6): Citrulline
  MOD_RES (13)..(13): Citrulline
FTKVKXGADGVMXTMN

SEQ ID NO: 3175 - protein, 16 aa, Artificial Sequence
  source: /note="Description of Artificial Sequence: Synthetic peptide"
  MOD_RES (11)..(11): Citrulline
  MOD_RES (16)..(16): Citrulline
PLLPSCDATAXGTEIX

SEQ ID NO: 3176 - protein, 16 aa, Artificial Sequence
  source: /note="Description of Artificial Sequence: Synthetic peptide"
  MOD_RES (7)..(7): Citrulline
  MOD_RES (12)..(12): Citrulline
SCDATAXGTEIXSYGN

SEQ ID NO: 3177 - protein, 14 aa, Artificial Sequence
  source: /note="Description of Artificial Sequence: Synthetic peptide"
  MOD_RES (3)..(3): Citrulline
  MOD_RES (8)..(8): Citrulline
TAXGTEIXSYGNDP

SEQ ID NO: 3178 - protein, 16 aa, Artificial Sequence
  source: /note="Description of Artificial Sequence: Synthetic peptide"
  MOD_RES (6)..(6): Citrulline
EDVVYXGDMLLEKIQS

SEQ ID NO: 3179 - protein, 16 aa, Artificial Sequence
  source: /note="Description of Artificial Sequence: Synthetic peptide"
  MOD_RES (2)..(2): Citrulline
YXGDMLLEKIQSALAD

SEQ ID NO: 3180 - protein, 16 aa, Artificial Sequence
  source: /note="Description of Artificial Sequence: Synthetic peptide"
  MOD_RES (8)..(8): Citrulline
  MOD_RES (14)..(14): Citrulline
GFAPLTAXGSQQYXAL

SEQ ID NO: 3181 - protein, 16 aa, Artificial Sequence
  source: /note="Description of Artificial Sequence: Synthetic peptide"
  MOD_RES (11)..(11): Citrulline
QFSDCSSAKAXGDLGA

SEQ ID NO: 3182 - protein, 16 aa, Artificial Sequence
  source: /note="Description of Artificial Sequence: Synthetic peptide"
  MOD_RES (7)..(7): Citrulline
  MOD_RES (15)..(15): Citrulline
CSSAKAXGDLGAFSXG

SEQ ID NO: 3183 - protein, 16 aa, Artificial Sequence
  source: /note="Description of Artificial Sequence: Synthetic peptide"
  MOD_RES (3)..(3): Citrulline
  MOD_RES (11)..(11): Citrulline
KAXGDLGAFSXGQMQK

SEQ ID NO: 3184 - protein, 16 aa, Artificial Sequence
  source: /note="Description of Artificial Sequence: Synthetic peptide"
  MOD_RES (7)..(7): Citrulline
DLGAFSXGQMQKPFED

SEQ ID NO: 3185 - protein, 16 aa, Artificial Sequence
  source: /note="Description of Artificial Sequence: Synthetic peptide"
  MOD_RES (13)..(13): Citrulline
  MOD_RES (16)..(16): Citrulline
QVASLKKNVWLDXGTX

SEQ ID NO: 3186 - protein, 16 aa, Artificial Sequence
  source: /note="Description of Artificial Sequence: Synthetic peptide"
  MOD_RES (9)..(9): Citrulline
  MOD_RES (12)..(12): Citrulline
LKKNVWLDXGTXATFI

SEQ ID NO: 3187 - protein, 16 aa, Artificial Sequence
  source: /note="Description of Artificial Sequence: Synthetic peptide"
  MOD_RES (10)..(10): Citrulline
KEGQGNLPVXGTIPDM

SEQ ID NO: 3188 - protein, 16 aa, Artificial Sequence
  source: /note="Description of Artificial Sequence: Synthetic peptide"
  MOD_RES (6)..(6): Citrulline
GNLPVXGTIPDMIADS

SEQ ID NO: 3189 - protein, 16 aa, Artificial Sequence
  source: /note="Description of Artificial Sequence: Synthetic peptide"
  MOD_RES (11)..(11): Citrulline
GTKTPGPPPPXGAQPL

SEQ ID NO: 3190 - protein, 16 aa, Artificial Sequence
  source: /note="Description of Artificial Sequence: Synthetic peptide"
  MOD_RES (7)..(7): Citrulline
PGPPPPXGAQPLLPLP

SEQ ID NO: 3191 - protein, 16 aa, Artificial Sequence
  source: /note="Description of Artificial Sequence: Synthetic peptide"
  MOD_RES (7)..(7): Citrulline
  MOD_RES (11)..(11): Citrulline
TNCAYDXIVLXGQEIV

SEQ ID NO: 3192 - protein, 16 aa, Artificial Sequence
  source: /note="Description of Artificial Sequence: Synthetic peptide"
  MOD_RES (14)..(14): Citrulline
GPEHPNPGKPFTAXGF

SEQ ID NO: 3193 - protein, 16 aa, Artificial Sequence
  source: /note="Description of Artificial Sequence: Synthetic peptide"
  MOD_RES (10)..(10): Citrulline
PNPGKPFTAXGFPASA

SEQ ID NO: 3194 - protein, 16 aa, Artificial Sequence
  source: /note="Description of Artificial Sequence: Synthetic peptide"
  MOD_RES (6)..(6): Citrulline
KPFTAXGFPASATFQT

SEQ ID NO: 3195 - protein, 16 aa, Artificial Sequence
  source: /note="Description of Artificial Sequence: Synthetic peptide"
  MOD_RES (3)..(3): Citrulline
  MOD_RES (10)..(10): Citrulline
HQXAKEILTXGGPNTV

SEQ ID NO: 3196 - protein, 16 aa, Artificial Sequence
  source: /note="Description of Artificial Sequence: Synthetic peptide"
  MOD_RES (6)..(6): Citrulline
KEILTXGGPNTVTPPP

SEQ ID NO: 3197 - protein, 16 aa, Artificial Sequence
  source: /note="Description of Artificial Sequence: Synthetic peptide"
  MOD_RES (10)..(10): Citrulline
NLYYMALIEXGTAKLQ

SEQ ID NO: 3198 - protein, 16 aa, Artificial Sequence
  source: /note="Description of Artificial Sequence: Synthetic peptide"
  MOD_RES (6)..(6): Citrulline
MALIEXGTAKLQAAVV

SEQ ID NO: 3199 - protein, 16 aa, Artificial Sequence
  source: /note="Description of Artificial Sequence: Synthetic peptide"
  MOD_RES (11)..(11): Citrulline
DEGQVTVYINXGNGAL

SEQ ID NO: 3200 - protein, 16 aa, Artificial Sequence
  source: /note="Description of Artificial Sequence: Synthetic peptide"
  MOD_RES (7)..(7): Citrulline
VTVYINXGNGALEEQL

SEQ ID NO: 3201 - protein, 16 aa, Artificial Sequence
  source: /note="Description of Artificial Sequence: Synthetic peptide"
  MOD_RES (8)..(8): Citrulline
PIAASTNXGKDLIGVQ

SEQ ID NO: 3202 - protein, 16 aa, Artificial Sequence
  source: /note="Description of Artificial Sequence: Synthetic peptide"
  MOD_RES (4)..(4): Citrulline
STNXGKDLIGVQNLLK

SEQ ID NO: 3203 - protein, 16 aa, Artificial Sequence
  source: /note="Description of Artificial Sequence: Synthetic peptide"
  MOD_RES (10)..(10): Citrulline
  MOD_RES (13)..(13): Citrulline
KELKQLAAAXGQXLEE

SEQ ID NO: 3204 - protein, 16 aa, Artificial Sequence
  source: /note="Description of Artificial Sequence: Synthetic peptide"
  MOD_RES (6)..(6): Citrulline
  MOD_RES (9)..(9): Citrulline
QLAAAXGQXLEESLEY

SEQ ID NO: 3205 - protein, 16 aa, Artificial Sequence
  source: /note="Description of Artificial Sequence: Synthetic peptide"
  MOD_RES (8)..(8): Citrulline
  MOD_RES (12)..(12): Citrulline
SQMENWSXHYPXGSCN

SEQ ID NO: 3206 - protein, 16 aa, Artificial Sequence
  source: /note="Description of Artificial Sequence: Synthetic peptide"
  MOD_RES (4)..(4): Citrulline
  MOD_RES (8)..(8): Citrulline
NWSXHYPXGSCNTTGA

SEQ ID NO: 3207 - protein, 16 aa, Artificial Sequence
  source: /note="Description of Artificial Sequence: Synthetic peptide"
  MOD_RES (2)..(2): Citrulline
  MOD_RES (8)..(8): Citrulline
LXGPGASXGGSPVKAS

SEQ ID NO: 3208 - protein, 15 aa, Artificial Sequence
  source: /note="Description of Artificial Sequence: Synthetic peptide"
  MOD_RES (4)..(4): Citrulline
  MOD_RES (13)..(13): Citrulline
GASXGGSPVKASXFW

SEQ ID NO: 3209 - protein, 16 aa, Artificial Sequence
  source: /note="Description of Artificial Sequence: Synthetic peptide"
  MOD_RES (4)..(4): Citrulline
  MOD_RES (10)..(10): Citrulline
EKLXAQCLSXGASGIQ

SEQ ID NO: 3210 - protein, 16 aa, Artificial Sequence
  source: /note="Description of Artificial Sequence: Synthetic peptide"
  MOD_RES (6)..(6): Citrulline
  MOD_RES (16)..(16): Citrulline
AQCLSXGASGIQGLAX

SEQ ID NO: 3211 - protein, 16 aa, Artificial Sequence
  source: /note="Description of Artificial Sequence: Synthetic peptide"
  MOD_RES (13)..(13): Citrulline
PSIHSTTPLSSTXGTG

SEQ ID NO: 3212 - protein, 16 aa, Artificial Sequence
  source: /note="Description of Artificial Sequence: Synthetic peptide"
  MOD_RES (9)..(9): Citrulline
STTPLSSTXGTGLPAI

SEQ ID NO: 3213 - protein, 16 aa, Artificial Sequence
  source: /note="Description of Artificial Sequence: Synthetic peptide"
  MOD_RES (5)..(5): Citrulline
LSSTXGTGLPAITDVP

SEQ ID NO: 3214 - protein, 16 aa, Artificial Sequence
  source: /note="Description of Artificial Sequence: Synthetic peptide"
  MOD_RES (12)..(12): Citrulline
  MOD_RES (14)..(14): Citrulline
QVPMSEKGKITXGXLG

SEQ ID NO: 3215 - protein, 16 aa, Artificial Sequence
  source: /note="Description of Artificial Sequence: Synthetic peptide"
  MOD_RES (8)..(8): Citrulline
  MOD_RES (10)..(10): Citrulline
SEKGKITXGXLGSLSL

SEQ ID NO: 3216 - protein, 16 aa, Artificial Sequence
  source: /note="Description of Artificial Sequence: Synthetic peptide"
  MOD_RES (4)..(4): Citrulline
  MOD_RES (6)..(6): Citrulline
KITXGXLGSLSLKKEG

SEQ ID NO: 3217 - protein, 16 aa, Artificial Sequence
  source: /note="Description of Artificial Sequence: Synthetic peptide"
  MOD_RES (11)..(11): Citrulline
  MOD_RES (13)..(13): Citrulline
MLSSVCVSSFXGXQGA

SEQ ID NO: 3218 - protein, 16 aa, Artificial Sequence
  source: /note="Description of Artificial Sequence: Synthetic peptide"
  MOD_RES (7)..(7): Citrulline
  MOD_RES (9)..(9): Citrulline
VCVSSFXGXQGASKQQ

SEQ ID NO: 3219 - protein, 16 aa, Artificial Sequence
  source: /note="Description of Artificial Sequence: Synthetic peptide"
  MOD_RES (3)..(3): Citrulline
  MOD_RES (5)..(5): Citrulline
SFXGXQGASKQQPAPP

SEQ ID NO: 3220 - protein, 16 aa, Artificial Sequence
  source: /note="Description of Artificial Sequence: Synthetic peptide"
  MOD_RES (2)..(2): Citrulline
  MOD_RES (9)..(9): Citrulline
GXFSGLLGXGAAPTLV

SEQ ID NO: 3221 - protein, 16 aa, Artificial Sequence
  source: /note="Description of Artificial Sequence: Synthetic peptide"
  MOD_RES (5)..(5): Citrulline
GLLGXGAAPTLVPQQP

SEQ ID NO: 3222 - protein, 16 aa, Artificial Sequence
  source: /note="Description of Artificial Sequence: Synthetic peptide"
  MOD_RES (10)..(10): Citrulline
QGQSPPAPTXGISKHS

SEQ ID NO: 3223 - protein, 16 aa, Artificial Sequence
  source: /note="Description of Artificial Sequence: Synthetic peptide"
  MOD_RES (6)..(6): Citrulline
PPAPTXGISKHSTSGT

SEQ ID NO: 3224 - protein, 16 aa, Artificial Sequence
  source: /note="Description of Artificial Sequence: Synthetic peptide"
  MOD_RES (4)..(4): Citrulline
  MOD_RES (9)..(9): Citrulline
FQTXLQFVXGGDIITD

SEQ ID NO: 3225 - protein, 16 aa, Artificial Sequence
  source: /note="Description of Artificial Sequence: Synthetic peptide"
  MOD_RES (5)..(5): Citrulline
LQFVXGGDIITDKKDM

SEQ ID NO: 3226 - protein, 16 aa, Artificial Sequence
  source: /note="Description of Artificial Sequence: Synthetic peptide"
  MOD_RES (11)..(11): Citrulline
  MOD_RES (14)..(14): Citrulline
LIGLPGLKGAXGDXGS

SEQ ID NO: 3227 - protein, 16 aa, Artificial Sequence
  source: /note="Description of Artificial Sequence: Synthetic peptide"
  MOD_RES (7)..(7): Citrulline
  MOD_RES (10)..(10): Citrulline
PGLKGAXGDXGSGGAQ

SEQ ID NO: 3228 - protein, 16 aa, Artificial Sequence
  source: /note="Description of Artificial Sequence: Synthetic peptide"
  MOD_RES (3)..(3): Citrulline
  MOD_RES (6)..(6): Citrulline
GAXGDXGSGGAQGPAG

SEQ ID NO: 3229 - protein, 16 aa, Artificial Sequence
  source: /note="Description of Artificial Sequence: Synthetic peptide"
  MOD_RES (5)..(5): Citrulline
FPGPXGEKGLPGFPGL

SEQ ID NO: 3230 - protein, 16 aa, Artificial Sequence
  source: /note="Description of Artificial Sequence: Synthetic peptide"
  MOD_RES (12)..(12): Citrulline
GIPGLPGIPGTXGLKG

SEQ ID NO: 3231 - protein, 16 aa, Artificial Sequence
  source: /note="Description of Artificial Sequence: Synthetic peptide"
  MOD_RES (8)..(8): Citrulline
LPGIPGTXGLKGIPGS

SEQ ID NO: 3232 - protein, 16 aa, Artificial Sequence
  source: /note="Description of Artificial Sequence: Synthetic peptide"
  MOD_RES (5)..(5): Citrulline
SQGIXGSPGLPGASGL

SEQ ID NO: 3233 - protein, 16 aa, Artificial Sequence
  source: /note="Description of Artificial Sequence: Synthetic peptide"
  MOD_RES (11)..(11): Citrulline
  MOD_RES (14)..(14): Citrulline
LPGSVGLQGPXGLXGL

SEQ ID NO: 3234 - protein, 16 aa, Artificial Sequence
  source: /note="Description of Artificial Sequence: Synthetic peptide"
  MOD_RES (7)..(7): Citrulline
  MOD_RES (10)..(10): Citrulline
VGLQGPXGLXGLPGPL

SEQ ID NO: 3235 - protein, 16 aa, Artificial Sequence
  source: /note="Description of Artificial Sequence: Synthetic peptide"
  MOD_RES (3)..(3): Citrulline
  MOD_RES (6)..(6): Citrulline
GPXGLXGLPGPLGPPG

SEQ ID NO: 3236 - protein, 16 aa, Artificial Sequence
  source: /note="Description of Artificial Sequence: Synthetic peptide"
  MOD_RES (14)..(14): Citrulline
ALGPQGPPGAPGVXGF

SEQ ID NO: 3237 - protein, 16 aa, Artificial Sequence
  source: /note="Description of Artificial Sequence: Synthetic peptide"
  MOD_RES (10)..(10): Citrulline
QGPPGAPGVXGFQGQK

SEQ ID NO: 3238 - protein, 16 aa, Artificial Sequence
  source: /note="Description of Artificial Sequence: Synthetic peptide"
  MOD_RES (6)..(6): Citrulline
GAPGVXGFQGQKGSMG

SEQ ID NO: 3239 - protein, 16 aa, Artificial Sequence
  source: /note="Description of Artificial Sequence: Synthetic peptide"
  MOD_RES (2)..(2): Citrulline
VXGFQGQKGSMGDPGL

SEQ ID NO: 3240 - protein, 16 aa, Artificial Sequence
  source: /note="Description of Artificial Sequence: Synthetic peptide"
  MOD_RES (12)..(13): Citrulline
SNQQSGYGKVSXXGGH

SEQ ID NO: 3241 - protein, 16 aa, Artificial Sequence
  source: /note="Description of Artificial Sequence: Synthetic peptide"
  MOD_RES (8)..(9): Citrulline
SGYGKVSXXGGHQNSY

SEQ ID NO: 3242 - protein, 16 aa, Artificial Sequence
  source: /note="Description of Artificial Sequence: Synthetic peptide"
  MOD_RES (11)..(11): Citrulline
EQVGAYEEVKXGALPS

SEQ ID NO: 3243 - protein, 16 aa, Artificial Sequence
  source: /note="Description of Artificial Sequence: Synthetic peptide"
  MOD_RES (7)..(7): Citrulline
AYEEVKXGALPSGELN

SEQ ID NO: 3244 - protein, 16 aa, Artificial Sequence
  source: /note="Description of Artificial Sequence: Synthetic peptide"
  MOD_RES (12)..(12): Citrulline
YPASGHTTPLSXGTYE

SEQ ID NO: 3245 - protein, 16 aa, Artificial Sequence
  source: /note="Description of Artificial Sequence: Synthetic peptide"
  MOD_RES (8)..(8): Citrulline
GHTTPLSXGTYEVGLE

SEQ ID NO: 3246 - protein, 16 aa, Artificial Sequence
  source: /note="Description of Artificial Sequence: Synthetic peptide"
  MOD_RES (4)..(4): Citrulline
PLSXGTYEVGLEDNIG

SEQ ID NO: 3247 - protein, 16 aa, Artificial Sequence
  source: /note="Description of Artificial Sequence: Synthetic peptide"
  MOD_RES (7)..(7): Citrulline
  MOD_RES (9)..(9): Citrulline
KPTVTIXTXGAIIQTP

SEQ ID NO: 3248 - protein, 16 aa, Artificial Sequence
  source: /note="Description of Artificial Sequence: Synthetic peptide"
  MOD_RES (3)..(3): Citrulline
  MOD_RES (5)..(5): Citrulline
TIXTXGAIIQTPTLGP

SEQ ID NO: 3249 - protein, 16 aa, Artificial Sequence
  source: /note="Description of Artificial Sequence: Synthetic peptide"
  MOD_RES (1)..(1): Citrulline
  MOD_RES (12)..(12): Citrulline
XINLSVLGPATXGSQG

SEQ ID NO: 3250 - protein, 16 aa, Artificial Sequence
  source: /note="Description of Artificial Sequence: Synthetic peptide"
  MOD_RES (8)..(8): Citrulline
  MOD_RES (15)..(15): Citrulline
SVLGPATXGSQGLGXH

SEQ ID NO: 3251 - protein, 16 aa, Artificial Sequence
  source: /note="Description of Artificial Sequence: Synthetic peptide"
  MOD_RES (5)..(5): Citrulline
  MOD_RES (11)..(11): Citrulline
HMASXGGVAGXGGFAQ

SEQ ID NO: 3252 - protein, 15 aa, Artificial Sequence
  source: /note="Description of Artificial Sequence: Synthetic peptide"
  MOD_RES (1)..(1): Citrulline
  MOD_RES (7)..(7): Citrulline
XGGVAGXGGFAQGGH

SEQ ID NO: 3253 - protein, 16 aa, Artificial Sequence
  source: /note="Description of Artificial Sequence: Synthetic peptide"
  MOD_RES (11)..(11): Citrulline
PYSGDLTKFGXGDASS

SEQ ID NO: 3254 - protein, 16 aa, Artificial Sequence
  source: /note="Description of Artificial Sequence: Synthetic peptide"
  MOD_RES (13)..(13): Citrulline
  MOD_RES (15)..(15): Citrulline
KVLFTKETAGYLXGXP

SEQ ID NO: 3255 - protein, 16 aa, Artificial Sequence
  source: /note="Description of Artificial Sequence: Synthetic peptide"
  MOD_RES (9)..(9): Citrulline
  MOD_RES (11)..(11): Citrulline
TKETAGYLXGXPQDTV

SEQ ID NO: 3256 - protein, 16 aa, Artificial Sequence
  source: /note="Description of Artificial Sequence: Synthetic peptide"
  MOD_RES (2)..(2): Citrulline
  MOD_RES (12)..(12): Citrulline
EXEGQGYSFVSXGEME

SEQ ID NO: 3257 - protein, 16 aa, Artificial Sequence
  source: /note="Description of Artificial Sequence: Synthetic peptide"
  MOD_RES (8)..(8): Citrulline
  MOD_RES (16)..(16): Citrulline
QGYSFVSXGEMEADVX

SEQ ID NO: 3258 - protein, 16 aa, Artificial Sequence
  source: /note="Description of Artificial Sequence: Synthetic peptide"
  MOD_RES (13)..(13): Citrulline
SFGLAQGVSWSGXGGA

SEQ ID NO: 3259 - protein, 16 aa, Artificial Sequence
  source: /note="Description of Artificial Sequence: Synthetic peptide"
  MOD_RES (9)..(9): Citrulline
AQGVSWSGXGGAGNIS

SEQ ID NO: 3260 - protein, 16 aa, Artificial Sequence
  source: /note="Description of Artificial Sequence: Synthetic peptide"
  MOD_RES (7)..(7): Citrulline
  MOD_RES (10)..(10): Citrulline
ISDYFPXFPXGLPPDA

SEQ ID NO: 3261 - protein, 16 aa, Artificial Sequence
  source: /note="Description of Artificial Sequence: Synthetic peptide"
  MOD_RES (3)..(3): Citrulline
  MOD_RES (6)..(6): Citrulline
QIXKAXGTFDNAETKK

SEQ ID NO: 3262 - protein, 16 aa, Artificial Sequence
  source: /note="Description of Artificial Sequence: Synthetic peptide"
  MOD_RES (2)..(2): Citrulline
AXGTFDNAETKKEFGP

SEQ ID NO: 3263 - protein, 16 aa, Artificial Sequence
  source: /note="Description of Artificial Sequence: Synthetic peptide"
  MOD_RES (6)..(6): Citrulline
  MOD_RES (9)..(9): Citrulline
QVAFNXVAXGMLHQDH

SEQ ID NO: 3264 - protein, 16 aa, Artificial Sequence
  source: /note="Description of Artificial Sequence: Synthetic peptide"
  MOD_RES (11)..(11): Citrulline
CKTTNTVEPLXGNLVK

SEQ ID NO: 3265 - protein, 16 aa, Artificial Sequence
  source: /note="Description of Artificial Sequence: Synthetic peptide"
  MOD_RES (7)..(7): Citrulline
NTVEPLXGNLVKKDCA

SEQ ID NO: 3266 - protein, 16 aa, Artificial Sequence
  source: /note="Description of Artificial Sequence: Synthetic peptide"
  MOD_RES (11)..(11): Citrulline
GQEQAFSVNTXGAGGQ

SEQ ID NO: 3267 - protein, 16 aa, Artificial Sequence
  source: /note="Description of Artificial Sequence: Synthetic peptide"
  MOD_RES (7)..(7): Citrulline
AFSVNTXGAGGQGQLD

SEQ ID NO: 3268 - protein, 16 aa, Artificial Sequence
  source: /note="Description of Artificial Sequence: Synthetic peptide"
  MOD_RES (6)..(6): Citrulline
  MOD_RES (12)..(12): Citrulline
VNKANXFTVETXGAGT

SEQ ID NO: 3269 - protein, 16 aa, Artificial Sequence
  source: /note="Description of Artificial Sequence: Synthetic peptide"
  MOD_RES (2)..(2): Citrulline
  MOD_RES (8)..(8): Citrulline
NXFTVETXGAGTGGLG

SEQ ID NO: 3270 - protein, 16 aa, Artificial Sequence
  source: /note="Description of Artificial Sequence: Synthetic peptide"
  MOD_RES (13)..(13): Citrulline
VLVETVTKSSSSXGSS

SEQ ID NO: 3271 - protein, 16 aa, Artificial Sequence
  source: /note="Description of Artificial Sequence: Synthetic peptide"
  MOD_RES (9)..(9): Citrulline
TVTKSSSSXGSSYSSI

SEQ ID NO: 3272 - protein, 16 aa, Artificial Sequence
  source: /note="Description of Artificial Sequence: Synthetic peptide"
  MOD_RES (5)..(5): Citrulline
SSSSXGSSYSSIPKFS

SEQ ID NO: 3273 - protein, 16 aa, Artificial Sequence
  source: /note="Description of Artificial Sequence: Synthetic peptide"
  MOD_RES (9)..(9): Citrulline
SYTCHCDGXGGLKLSQ

SEQ ID NO: 3274 - protein, 16 aa, Artificial Sequence
  source: /note="Description of Artificial Sequence: Synthetic peptide"
  MOD_RES (5)..(5): Citrulline
HCDGXGGLKLSQDMDT

SEQ ID NO: 3275 - protein, 16 aa, Artificial Sequence
  source: /note="Description of Artificial Sequence: Synthetic peptide"
  MOD_RES (2)..(2): Citrulline
  MOD_RES (11)..(11): Citrulline
TXMQCFSVTEXGSFYP

SEQ ID NO: 3276 - protein, 16 aa, Artificial Sequence
  source: /note="Description of Artificial Sequence: Synthetic peptide"
  MOD_RES (11)..(11): Citrulline
  MOD_RES (14)..(14): Citrulline
LMGHSEWDHKXGPXGS

SEQ ID NO: 3277 - protein, 16 aa, Artificial Sequence
  source: /note="Description of Artificial Sequence: Synthetic peptide"
  MOD_RES (7)..(7): Citrulline
  MOD_RES (10)..(10): Citrulline
SEWDHKXGPXGSQSSG

SEQ ID NO: 3278 - protein, 16 aa, Artificial Sequence
  source: /note="Description of Artificial Sequence: Synthetic peptide"
  MOD_RES (3)..(3): Citrulline
  MOD_RES (6)..(6): Citrulline
HKXGPXGSQSSGTSIT

SEQ ID NO: 3279 - protein, 16 aa, Artificial Sequence
  source: /note="Description of Artificial Sequence: Synthetic peptide"
  MOD_RES (3)..(3): Citrulline
  MOD_RES (10)..(10): Citrulline
GAXGLMNGYXGPANGF

SEQ ID NO: 3280 - protein, 16 aa, Artificial Sequence
  source: /note="Description of Artificial Sequence: Synthetic peptide"
  MOD_RES (6)..(6): Citrulline
  MOD_RES (13)..(13): Citrulline
LMNGYXGPANGFXGGY

SEQ ID NO: 3281 - protein, 16 aa, Artificial Sequence
  source: /note="Description of Artificial Sequence: Synthetic peptide"
  MOD_RES (7)..(7): Citrulline
  MOD_RES (16)..(16): Citrulline
DYSGYQXDGYQQNFKX

SEQ ID NO: 3282 - protein, 16 aa, Artificial Sequence
  source: /note="Description of Artificial Sequence: Synthetic peptide"
  MOD_RES (3)..(3): Citrulline
  MOD_RES (12)..(12): Citrulline
YQXDGYQQNFKXGSGQ

SEQ ID NO: 3283 - protein, 16 aa, Artificial Sequence
  source: /note="Description of Artificial Sequence: Synthetic peptide"
  MOD_RES (8)..(8): Citrulline
  MOD_RES (16)..(16): Citrulline
GYQQNFKXGSGQSGPX

SEQ ID NO: 3284 - protein, 16 aa, Artificial Sequence
  source: /note="Description of Artificial Sequence: Synthetic peptide"
  MOD_RES (9)..(9): Citrulline
QNDAYDVPXGVQFLEP

SEQ ID NO: 3285 - protein, 16 aa, Artificial Sequence
  source: /note="Description of Artificial Sequence: Synthetic peptide"
  MOD_RES (5)..(5): Citrulline
YDVPXGVQFLEPPAET

SEQ ID NO: 3286 - protein, 16 aa, Artificial Sequence
  source: /note="Description of Artificial Sequence: Synthetic peptide"
  MOD_RES (10)..(10): Citrulline
NTCKDNPCGXGQCLIT

SEQ ID NO: 3287 - protein, 16 aa, Artificial Sequence
  source: /note="Description of Artificial Sequence: Synthetic peptide"
  MOD_RES (6)..(6): Citrulline
DNPCGXGQCLITQSPP

SEQ ID NO: 3288 - protein, 16 aa, Artificial Sequence
  source: /note="Description of Artificial Sequence: Synthetic peptide"
  MOD_RES (11)..(11): Citrulline
  MOD_RES (16)..(16): Citrulline
DCYVGDGYSYXGKMNX

SEQ ID NO: 3289 - protein, 16 aa, Artificial Sequence
  source: /note="Description of Artificial Sequence: Synthetic peptide"
  MOD_RES (7)..(7): Citrulline
  MOD_RES (12)..(12): Citrulline
GDGYSYXGKMNXTVNQ

SEQ ID NO: 3290 - protein, 16 aa, Artificial Sequence
  source: /note="Description of Artificial Sequence: Synthetic peptide"
  MOD_RES (2)..(2): Citrulline
  MOD_RES (11)..(11): Citrulline
TXATSDNLQVXGSDYS

SEQ ID NO: 3291 - protein, 16 aa, Artificial Sequence
  source: /note="Description of Artificial Sequence: Synthetic peptide"
  MOD_RES (6)..(6): Citrulline
EPPFLXGHTKQSMDMS

SEQ ID NO: 3292 - protein, 16 aa, Artificial Sequence
  source: /note="Description of Artificial Sequence: Synthetic peptide"
  MOD_RES (14)..(14): Citrulline
QITQYLAEAGYTSXGK

SEQ ID NO: 3293 - protein, 16 aa, Artificial Sequence
  source: /note="Description of Artificial Sequence: Synthetic peptide"
  MOD_RES (10)..(10): Citrulline
YLAEAGYTSXGKIGCT

SEQ ID NO: 3294 - protein, 16 aa, Artificial Sequence
  source: /note="Description of Artificial Sequence: Synthetic peptide"
  MOD_RES (9)..(9): Citrulline
  MOD_RES (14)..(14): Citrulline
QETQAELPXGSIPXSL

SEQ ID NO: 3295 - protein, 16 aa, Artificial Sequence
  source: /note="Description of Artificial Sequence: Synthetic peptide"
  MOD_RES (11)..(11): Citrulline
GEMMTQMVLSXGSIFP

SEQ ID NO: 3296 - protein, 16 aa, Artificial Sequence
  source: /note="Description of Artificial Sequence: Synthetic peptide"
  MOD_RES (7)..(7): Citrulline
TQMVLSXGSIFPMSVP

SEQ ID NO: 3297 - protein, 16 aa, Artificial Sequence
  source: /note="Description of Artificial Sequence: Synthetic peptide"
  MOD_RES (3)..(3): Citrulline
LSXGSIFPMSVPDVPP

SEQ ID NO: 3298 - protein, 16 aa, Artificial Sequence
  source: /note="Description of Artificial Sequence: Synthetic peptide"
  MOD_RES (6)..(6): Citrulline
  MOD_RES (11)..(11): Citrulline
NYLQNXKSTSXGDLPD

SEQ ID NO: 3299 - protein, 16 aa, Artificial Sequence
  source: /note="Description of Artificial Sequence: Synthetic peptide"
  MOD_RES (2)..(2): Citrulline
  MOD_RES (7)..(7): Citrulline
NXKSTSXGDLPDPIGT

SEQ ID NO: 3300 - protein, 16 aa, Artificial Sequence
  source: /note="Description of Artificial Sequence: Synthetic peptide"
  MOD_RES (3)..(3): Citrulline
TSXGDLPDPIGTGLDP

SEQ ID NO: 3301 - protein, 16 aa, Artificial Sequence
  source: /note="Description of Artificial Sequence: Synthetic peptide"
  MOD_RES (2)..(2): Citrulline
  MOD_RES (6)..(6): Citrulline
SXTVQXGDFQASEWKV

SEQ ID NO: 3302 - protein, 16 aa, Artificial Sequence
  source: /note="Description of Artificial Sequence: Synthetic peptide"
  MOD_RES (2)..(2): Citrulline
QXGDFQASEWKVQLKT

SEQ ID NO: 3303 - protein, 16 aa, Artificial Sequence
  source: /note="Description of Artificial Sequence: Synthetic peptide"
  MOD_RES (5)..(5): Citrulline
  MOD_RES (9)..(9): Citrulline
PDQIXGEPXGSSGLVN

SEQ ID NO: 3304 - protein, 16 aa, Artificial Sequence
  source: /note="Description of Artificial Sequence: Synthetic peptide"
  MOD_RES (13)..(13): Citrulline
IQIECSQGHVFTXGTQ

SEQ ID NO: 3305 - protein, 16 aa, Artificial Sequence
  source: /note="Description of Artificial Sequence: Synthetic peptide"
  MOD_RES (9)..(9): Citrulline
  MOD_RES (13)..(13): Citrulline
CSQGHVFTXGTQXLIP

SEQ ID NO: 3306 - protein, 16 aa, Artificial Sequence
  source: /note="Description of Artificial Sequence: Synthetic peptide"
  MOD_RES (5)..(5): Citrulline
  MOD_RES (9)..(9): Citrulline
HVFTXGTQXLIPQAGT

SEQ ID NO: 3307 - protein, 16 aa, Artificial Sequence
  source: /note="Description of Artificial Sequence: Synthetic peptide"
  MOD_RES (8)..(8): Citrulline
SATGSEVXGKLETKSD

SEQ ID NO: 3308 - protein, 16 aa, Artificial Sequence
  source: /note="Description of Artificial Sequence: Synthetic peptide"
  MOD_RES (4)..(4): Citrulline
SEVXGKLETKSDLNMQ

SEQ ID NO: 3309 - protein, 16 aa, Artificial Sequence
  source: /note="Description of Artificial Sequence: Synthetic peptide"
  MOD_RES (13)..(13): Citrulline
SGNGTGGSFSLNXGSQ

SEQ ID NO: 3310 - protein, 16 aa, Artificial Sequence
  source: /note="Description of Artificial Sequence: Synthetic peptide"
  MOD_RES (9)..(9): Citrulline
TGGSFSLNXGSQALKF

SEQ ID NO: 3311 - protein, 16 aa, Artificial Sequence
  source: /note="Description of Artificial Sequence: Synthetic peptide"
  MOD_RES (2)..(2): Citrulline
  MOD_RES (11)..(11): Citrulline
HXQLSKAQKHXGSLEI

SEQ ID NO: 3312 - protein, 16 aa, Artificial Sequence
  source: /note="Description of Artificial Sequence: Synthetic peptide"
  MOD_RES (7)..(7): Citrulline
SKAQKHXGSLEIADQL

SEQ ID NO: 3313 - protein, 16 aa, Artificial Sequence
  source: /note="Description of Artificial Sequence: Synthetic peptide"
  MOD_RES (10)..(10): Citrulline
LDVSLPFVSXGPLTVE

SEQ ID NO: 3314 - protein, 16 aa, Artificial Sequence
  source: /note="Description of Artificial Sequence: Synthetic peptide"
  MOD_RES (6)..(6): Citrulline
  MOD_RES (16)..(16): Citrulline
LPFVSXGPLTVEETPX

SEQ ID NO: 3315 - protein, 16 aa, Artificial Sequence
  source: /note="Description of Artificial Sequence: Synthetic peptide"
  MOD_RES (9)..(9): Citrulline
  MOD_RES (11)..(11): Citrulline
TEPMGIQGXGXQTVDK

SEQ ID NO: 3316 - protein, 16 aa, Artificial Sequence
  source: /note="Description of Artificial Sequence: Synthetic peptide"
  MOD_RES (5)..(5): Citrulline
  MOD_RES (7)..(7): Citrulline
GIQGXGXQTVDKVMGI

SEQ ID NO: 3317 - protein, 16 aa, Artificial Sequence
  source: /note="Description of Artificial Sequence: Synthetic peptide"
  MOD_RES (13)..(13): Citrulline
SAPVPSGSQSGGXGSP

SEQ ID NO: 3318 - protein, 16 aa, Artificial Sequence
  source: /note="Description of Artificial Sequence: Synthetic peptide"
  MOD_RES (9)..(9): Citrulline
  MOD_RES (16)..(16): Citrulline
PSGSQSGGXGSPVSPX

SEQ ID NO: 3319 - protein, 16 aa, Artificial Sequence
  source: /note="Description of Artificial Sequence: Synthetic peptide"
  MOD_RES (9)..(9): Citrulline
  MOD_RES (12)..(12): Citrulline
MNDIVVYHXGSXSCKD

SEQ ID NO: 3320 - protein, 16 aa, Artificial Sequence
  source: /note="Description of Artificial Sequence: Synthetic peptide"
  MOD_RES (5)..(5): Citrulline
  MOD_RES (8)..(8): Citrulline
VVYHXGSXSCKDAAVG

SEQ ID NO: 3321 - protein, 16 aa, Artificial Sequence
  source: /note="Description of Artificial Sequence: Synthetic peptide"
  MOD_RES (3)..(3): Citrulline
  MOD_RES (12)..(12): Citrulline
LGXKTSPGPTHXGSFD

SEQ ID NO: 3322 - protein, 12 aa, Artificial Sequence
  source: /note="Description of Artificial Sequence: Synthetic peptide"
  MOD_RES (8)..(8): Citrulline
TSPGPTHXGSFD

SEQ ID NO: 3323 - protein, 16 aa, Artificial Sequence
  source: /note="Description of Artificial Sequence: Synthetic peptide"
  MOD_RES (11)..(11): Citrulline
GPSGSHPQGPXGSPTG

SEQ ID NO: 3324 - protein, 16 aa, Artificial Sequence
  source: /note="Description of Artificial Sequence: Synthetic peptide"
  MOD_RES (7)..(7): Citrulline
SHPQGPXGSPTGGAQL

SEQ ID NO: 3325 - protein, 16 aa, Artificial Sequence
  source: /note="Description of Artificial Sequence: Synthetic peptide"
  MOD_RES (9)..(9): Citrulline
SLSMLHYIXGAAPKDI

SEQ ID NO: 3326 - protein, 16 aa, Artificial Sequence
  source: /note="Description of Artificial Sequence: Synthetic peptide"
  MOD_RES (5)..(5): Citrulline
LHYIXGAAPKDIPVPL

SEQ ID NO: 3327 - protein, 16 aa, Artificial Sequence
  source: /note="Description of Artificial Sequence: Synthetic peptide"
  MOD_RES (9)..(9): Citrulline
ALPAMHWPXGYLKGYP

SEQ ID NO: 3328 - protein, 13 aa, Artificial Sequence
  source: /note="Description of Artificial Sequence: Synthetic peptide"
  MOD_RES (5)..(5): Citrulline
  MOD_RES (13)..(13): Citrulline
MHWPXGYLKGYPX

SEQ ID NO: 3329 - protein, 16 aa, Artificial Sequence
  source: /note="Description of Artificial Sequence: Synthetic peptide"
  MOD_RES (10)..(10): Citrulline
  MOD_RES (14)..(14): Citrulline
MANLEESFPXGGTXKI

SEQ ID NO: 3330 - protein, 16 aa, Artificial Sequence
  source: /note="Description of Artificial Sequence: Synthetic peptide"
  MOD_RES (6)..(6): Citrulline
  MOD_RES (10)..(10): Citrulline
EESFPXGGTXKIHKPE

SEQ ID NO: 3331 - protein, 16 aa, Artificial Sequence
  source: /note="Description of Artificial Sequence: Synthetic peptide"
  MOD_RES (7)..(7): Citrulline
PVSLQPXGLINKGNWC

SEQ ID NO: 3332 - protein, 16 aa, Artificial Sequence
  source: /note="Description of Artificial Sequence: Synthetic peptide"
  MOD_RES (3)..(3): Citrulline
QPXGLINKGNWCYINA

SEQ ID NO: 3333 - protein, 16 aa, Artificial Sequence
  source: /note="Description of Artificial Sequence: Synthetic peptide"
  MOD_RES (5)..(5): Citrulline
  MOD_RES (9)..(9): Citrulline
DNIAXFSSXGMTTWEL

SEQ ID NO: 3334 - protein, 15 aa, Artificial Sequence
  source: /note="Description of Artificial Sequence: Synthetic peptide"
  MOD_RES (1)..(1): Citrulline
  MOD_RES (5)..(5): Citrulline
XFSSXGMTTWELPGG

SEQ ID NO: 3335 - protein, 16 aa, Artificial Sequence
  source: /note="Description of Artificial Sequence: Synthetic peptide"
  MOD_RES (11)..(11): Citrulline
PDIVTYGAGVXGSGVK

SEQ ID NO: 3336 - protein, 16 aa, Artificial Sequence
  source: /note="Description of Artificial Sequence: Synthetic peptide"
  MOD_RES (7)..(7): Citrulline
  MOD_RES (16)..(16): Citrulline
TYGAGVXGSGVKGGCX

SEQ ID NO: 3337 - protein, 16 aa, Artificial Sequence
  source: /note="Description of Artificial Sequence: Synthetic peptide"
  MOD_RES (11)..(11): Citrulline
GGSTAPEVGWXGALGA

SEQ ID NO: 3338 - protein, 16 aa, Artificial Sequence
  source: /note="Description of Artificial Sequence: Synthetic peptide"
  MOD_RES (7)..(7): Citrulline
  MOD_RES (16)..(16): Citrulline
APEVGWXGALGASGGX

SEQ ID NO: 3339 - protein, 16 aa, Artificial Sequence
  source: /note="Description of Artificial Sequence: Synthetic peptide"
  MOD_RES (10)..(10): Citrulline
  MOD_RES (15)..(15): Citrulline
SLQEELSLAXGTIEXL

SEQ ID NO: 3340 - protein, 16 aa, Artificial Sequence
  source: /note="Description of Artificial Sequence: Synthetic peptide"
  MOD_RES (6)..(6): Citrulline
  MOD_RES (11)..(11): Citrulline
ELSLAXGTIEXLTKSL

SEQ ID NO: 3341 - protein, 16 aa, Artificial Sequence
  source: /note="Description of Artificial Sequence: Synthetic peptide"
  MOD_RES (6)..(6): Citrulline
TFFIAXGNKAEHYTAK

SEQ ID NO: 3342 - protein, 16 aa, Artificial Sequence
  source: /note="Description of Artificial Sequence: Synthetic peptide"
  MOD_RES (6)..(6): Citrulline
YAIKTXGVPENFNEAK

SEQ ID NO: 3343 - protein, 16 aa, Artificial Sequence
  source: /note="Description of Artificial Sequence: Synthetic peptide"
  MOD_RES (2)..(2): Citrulline
TXGVPENFNEAKPIGF

SEQ ID NO: 3344 - protein, 16 aa, Artificial Sequence
  source: /note="Description of Artificial Sequence: Synthetic peptide"
  MOD_RES (5)..(5): Citrulline
  MOD_RES (8)..(8): Citrulline
GVKVXWQXGGSDISAS

SEQ ID NO: 3345 - protein, 16 aa, Artificial Sequence
  source: /note="Description of Artificial Sequence: Synthetic peptide"
  MOD_RES (1)..(1): Citrulline
  MOD_RES (4)..(4): Citrulline
XWQXGGSDISASNKYG

SEQ ID NO: 3346 - protein, 16 aa, Artificial Sequence
  source: /note="Description of Artificial Sequence: Synthetic peptide"
  MOD_RES (6)..(6): Citrulline
SDENVXGVWLKNGKEL

SEQ ID NO: 3347 - protein, 16 aa, Artificial Sequence
  source: /note="Description of Artificial Sequence: Synthetic peptide"
  MOD_RES (10)..(11): Citrulline
PSSASPALSXXGSLGE

SEQ ID NO: 3348 - protein, 16 aa, Artificial Sequence
  source: /note="Description of Artificial Sequence: Synthetic peptide"
  MOD_RES (6)..(7): Citrulline
SPALSXXGSLGEEGSE

SEQ ID NO: 3349 - protein, 16 aa, Artificial Sequence
  source: /note="Description of Artificial Sequence: Synthetic peptide"
  MOD_RES (2)..(3): Citrulline
SXXGSLGEEGSEPPPP

SEQ ID NO: 3350 - protein, 16 aa, Artificial Sequence
  source: /note="Description of Artificial Sequence: Synthetic peptide"
  MOD_RES (2)..(2): Citrulline
  MOD_RES (11)..(11): Citrulline
HXAHYETEGSXGAVKA

SEQ ID NO: 3351 - protein, 16 aa, Artificial Sequence
  source: /note="Description of Artificial Sequence: Synthetic peptide"
  MOD_RES (7)..(7): Citrulline
YETEGSXGAVKAAPGG

SEQ ID NO: 3352 - protein, 16 aa, Artificial Sequence
  source: /note="Description of Artificial Sequence: Synthetic peptide"
  MOD_RES (3)..(3): Citrulline
GSXGAVKAAPGGHPVV

SEQ ID NO: 3353 - protein, 16 aa, Artificial Sequence
  source: /note="Description of Artificial Sequence: Synthetic peptide"
  MOD_RES (1)..(1): Citrulline
  MOD_RES (11)..(11): Citrulline
XPFPSDPYGGXGSSFS

SEQ ID NO: 3354 - protein, 16 aa, Artificial Sequence
  source: /note="Description of Artificial Sequence: Synthetic peptide"
  MOD_RES (7)..(7): Citrulline
SDPYGGXGSSFSLGLP

SEQ ID NO: 3355 - protein, 16 aa, Artificial Sequence
  source: /note="Description of Artificial Sequence: Synthetic peptide"
  MOD_RES (8)..(8): Citrulline
  MOD_RES (16)..(16): Citrulline
APEQEKSXGGYSSGFX

SEQ ID NO: 3356 - protein, 16 aa, Artificial Sequence
  source: /note="Description of Artificial Sequence: Synthetic peptide"
  MOD_RES (4)..(4): Citrulline
  MOD_RES (12)..(12): Citrulline
EKSXGGYSSGFXDSVP

SEQ ID NO: 3357 - protein, 16 aa, Artificial Sequence
  source: /note="Description of Artificial Sequence: Synthetic peptide"
  MOD_RES (12)..(12): Citrulline
  MOD_RES (16)..(16): Citrulline
DWNEKLYPVWKXGDMX

SEQ ID NO: 3358 - protein, 16 aa, Artificial Sequence
  source: /note="Description of Artificial Sequence: Synthetic peptide"
  MOD_RES (8)..(8): Citrulline
  MOD_RES (12)..(12): Citrulline
KLYPVWKXGDMXWKNS

SEQ ID NO: 3359 - protein, 16 aa, Artificial Sequence
  source: /note="Description of Artificial Sequence: Synthetic peptide"
  MOD_RES (4)..(4): Citrulline
  MOD_RES (8)..(8): Citrulline
VWKXGDMXWKNSWKGG

SEQ ID NO: 3360 - protein, 16 aa, Artificial Sequence
  source: /note="Description of Artificial Sequence: Synthetic peptide"
  MOD_RES (9)..(9): Citrulline
  MOD_RES (12)..(12): Citrulline
SGGLDEISXVAXGTQG

SEQ ID NO: 3361 - protein, 16 aa, Artificial Sequence
  source: /note="Description of Artificial Sequence: Synthetic peptide"
  MOD_RES (5)..(5): Citrulline
  MOD_RES (8)..(8): Citrulline
DEISXVAXGTQGFPGP

SEQ ID NO: 3362 - protein, 16 aa, Artificial Sequence
  source: /note="Description of Artificial Sequence: Synthetic peptide"
  MOD_RES (13)..(13): Citrulline
SSKFKPTQSSLTXGGS

SEQ ID NO: 3363 - protein, 16 aa, Artificial Sequence
  source: /note="Description of Artificial Sequence: Synthetic peptide"
  MOD_RES (9)..(9): Citrulline
  MOD_RES (14)..(14): Citrulline
KPTQSSLTXGGSGXIS

SEQ ID NO: 3364 - protein, 16 aa, Artificial Sequence
  source: /note="Description of Artificial Sequence: Synthetic peptide"
  MOD_RES (5)..(5): Citrulline
  MOD_RES (10)..(10): Citrulline
SSLTXGGSGXISALQG

SEQ ID NO: 3365 - protein, 16 aa, Artificial Sequence
  source: /note="Description of Artificial Sequence: Synthetic peptide"
  MOD_RES (6)..(6): Citrulline
  MOD_RES (12)..(12): Citrulline
GAPGPXGPKGEXGLPG

SEQ ID NO: 3366 - protein, 16 aa, Artificial Sequence
  source: /note="Description of Artificial Sequence: Synthetic peptide"
  MOD_RES (2)..(2): Citrulline
  MOD_RES (8)..(8): Citrulline
PXGPKGEXGLPGVHGS

SEQ ID NO: 3367 - protein, 16 aa, Artificial Sequence
  source: /note="Description of Artificial Sequence: Synthetic peptide"
  MOD_RES (8)..(8): Citrulline
  MOD_RES (10)..(10): Citrulline
QQGGIDTXIXGLEILG

SEQ ID NO: 3368 - protein, 16 aa, Artificial Sequence
  source: /note="Description of Artificial Sequence: Synthetic peptide"
  MOD_RES (4)..(4): Citrulline
  MOD_RES (6)..(6): Citrulline
IDTXIXGLEILGPKPT

SEQ ID NO: 3369 - protein, 16 aa, Artificial Sequence
  source: /note="Description of Artificial Sequence: Synthetic peptide"
  MOD_RES (9)..(9): Citrulline
HDWSSLATXGLPSSIM

SEQ ID NO: 3370 - protein, 16 aa, Artificial Sequence
  source: /note="Description of Artificial Sequence: Synthetic peptide"
  MOD_RES (5)..(5): Citrulline
  MOD_RES (13)..(13): Citrulline
SLATXGLPSSIMXNLT

SEQ ID NO: 3371 - protein, 16 aa, Artificial Sequence
  source: /note="Description of Artificial Sequence: Synthetic peptide"
  MOD_RES (7)..(7): Citrulline
PVSLLAXGGALVASAS

SEQ ID NO: 3372 - protein, 16 aa, Artificial Sequence
  source: /note="Description of Artificial Sequence: Synthetic peptide"
  MOD_RES (3)..(3): Citrulline
LAXGGALVASASPQSS

SEQ ID NO: 3373 - protein, 16 aa, Artificial Sequence
  source: /note="Description of Artificial Sequence: Synthetic peptide"
  MOD_RES (2)..(2): Citrulline
  MOD_RES (12)..(12): Citrulline
LXQACCHPQAVXGEFL

SEQ ID NO: 3374 - protein, 16 aa, Artificial Sequence
  source: /note="Description of Artificial Sequence: Synthetic peptide"
  MOD_RES (8)..(8): Citrulline
CCHPQAVXGEFLPLQK

SEQ ID NO: 3375 - protein, 16 aa, Artificial Sequence
  source: /note="Description of Artificial Sequence: Synthetic peptide"
  MOD_RES (4)..(4): Citrulline
QAVXGEFLPLQKSTMT

SEQ ID NO: 3376 - protein, 16 aa, Artificial Sequence
  source: /note="Description of Artificial Sequence: Synthetic peptide"
  MOD_RES (8)..(8): Citrulline
  MOD_RES (11)..(11): Citrulline
GTFINSQXLSXGSEES

SEQ ID NO: 3377 - protein, 16 aa, Artificial Sequence
  source: /note="Description of Artificial Sequence: Synthetic peptide"
  MOD_RES (9)..(9): Citrulline
AQFLESVKXGEIPLEL

SEQ ID NO: 3378 - protein, 16 aa, Artificial Sequence
  source: /note="Description of Artificial Sequence: Synthetic peptide"
  MOD_RES (5)..(5): Citrulline
  MOD_RES (14)..(14): Citrulline
ESVKXGEIPLELQXLV

SEQ ID NO: 3379 - protein, 16 aa, Artificial Sequence
  source: /note="Description of Artificial Sequence: Synthetic peptide"
  MOD_RES (11)..(11): Citrulline
AIPIAVKFLHXGNKEL

SEQ ID NO: 3380 - protein, 16 aa, Artificial Sequence
  source: /note="Description of Artificial Sequence: Synthetic peptide"
  MOD_RES (7)..(7): Citrulline
  MOD_RES (14)..(14): Citrulline
AVKFLHXGNKELCXNM

SEQ ID NO: 3381 - protein, 16 aa, Artificial Sequence
  source: /note="Description of Artificial Sequence: Synthetic peptide"
  MOD_RES (12)..(12): Citrulline
ATAWGGTGTVSXGKPL

SEQ ID NO: 3382 - protein, 16 aa, Artificial Sequence
  source: /note="Description of Artificial Sequence: Synthetic peptide"
  MOD_RES (8)..(8): Citrulline
GGTGTVSXGKPLSTPG

SEQ ID NO: 3383 - protein, 16 aa, Artificial Sequence
  source: /note="Description of Artificial Sequence: Synthetic peptide"
  MOD_RES (4)..(4): Citrulline
TVSXGKPLSTPGDDLG

SEQ ID NO: 3384 - protein, 16 aa, Artificial Sequence
  source: /note="Description of Artificial Sequence: Synthetic peptide"
  MOD_RES (2)..(2): Citrulline
  MOD_RES (10)..(10): Citrulline
EXAVQEWFHXGTPVGQ

SEQ ID NO: 3385 - protein, 16 aa, Artificial Sequence
  source: /note="Description of Artificial Sequence: Synthetic peptide"
  MOD_RES (6)..(6): Citrulline
QEWFHXGTPVGQEEST

SEQ ID NO: 3386 - protein, 16 aa, Artificial Sequence
  source: /note="Description of Artificial Sequence: Synthetic peptide"
  MOD_RES (4)..(4): Citrulline
  MOD_RES (11)..(11): Citrulline
MSSXKQGSQPXGQQSA

SEQ ID NO: 3387 - protein, 16 aa, Artificial Sequence
  source: /note="Description of Artificial Sequence: Synthetic peptide"
  MOD_RES (7)..(7): Citrulline
KQGSQPXGQQSAEEEN

SEQ ID NO: 3388 - protein, 16 aa, Artificial Sequence
  source: /note="Description of Artificial Sequence: Synthetic peptide"
  MOD_RES (1)..(1): Citrulline
  MOD_RES (10)..(10): Citrulline
XELWDSIMTXGNAKYA

SEQ ID NO: 3389 - protein, 16 aa, Artificial Sequence
  source: /note="Description of Artificial Sequence: Synthetic peptide"
  MOD_RES (6)..(6): Citrulline
DSIMTXGNAKYANMWL

SEQ ID NO: 3390 - protein, 16 aa, Artificial Sequence
  source: /note="Description of Artificial Sequence: Synthetic peptide"
  MOD_RES (10)..(10): Citrulline
  MOD_RES (14)..(14): Citrulline
MLLPQTYGAXGKGXTQ

SEQ ID NO: 3391 - protein, 16 aa, Artificial Sequence
  source: /note="Description of Artificial Sequence: Synthetic peptide"
  MOD_RES (6)..(6): Citrulline
  MOD_RES (10)..(10): Citrulline
QTYGAXGKGXTQLSLL

SEQ ID NO: 3392 - protein, 16 aa, Artificial Sequence
  source: /note="Description of Artificial Sequence: Synthetic peptide"
  MOD_RES (10)..(10): Citrulline
TGLACLFLKXGADLGA

SEQ ID NO: 3393 - protein, 16 aa, Artificial Sequence
  source: /note="Description of Artificial Sequence: Synthetic peptide"
  MOD_RES (6)..(6): Citrulline
  MOD_RES (13)..(13): Citrulline
CLFLKXGADLGAXDSE

SEQ ID NO: 3394 - protein, 16 aa, Artificial Sequence
  source: /note="Description of Artificial Sequence: Synthetic peptide"
  MOD_RES (5)..(5): Citrulline
  MOD_RES (10)..(10): Citrulline
DTIAXFQKMXGMQVIN

SEQ ID NO: 3395 - protein, 16 aa, Artificial Sequence
  source: /note="Description of Artificial Sequence: Synthetic peptide"
  MOD_RES (1)..(1): Citrulline
  MOD_RES (6)..(6): Citrulline
XFQKMXGMQVINPMGW

SEQ ID NO: 3396 - protein, 16 aa, Artificial Sequence
  source: /note="Description of Artificial Sequence: Synthetic peptide"
  MOD_RES (2)..(2): Citrulline
MXGMQVINPMGWDAFG

SEQ ID NO: 3397 - protein, 16 aa, Artificial Sequence
  source: /note="Description of Artificial Sequence: Synthetic peptide"
  MOD_RES (7)..(7): Citrulline
  MOD_RES (10)..(10): Citrulline
ALTQKAXGKXVGGDVT

SEQ ID NO: 3398 - protein, 16 aa, Artificial Sequence
  source: /note="Description of Artificial Sequence: Synthetic peptide"
  MOD_RES (3)..(3): Citrulline
  MOD_RES (6)..(6): Citrulline
KAXGKXVGGDVTSDKL

SEQ ID NO: 3399 - protein, 16 aa, Artificial Sequence
  source: /note="Description of Artificial Sequence: Synthetic peptide"
  MOD_RES (10)..(10): Citrulline
SFSGISVLTXGDSSGS

SEQ ID NO: 3400 - protein, 16 aa, Artificial Sequence
  source: /note="Description of Artificial Sequence: Synthetic peptide"
  MOD_RES (6)..(6): Citrulline
ISVLTXGDSSGSSKSI

SEQ ID NO: 3401 - protein, 16 aa, Artificial Sequence
  source: /note="Description of Artificial Sequence: Synthetic peptide"
  MOD_RES (9)..(10): Citrulline
FIHINNKLXXGDIIGV

SEQ ID NO: 3402 - protein, 16 aa, Artificial Sequence
  source: /note="Description of Artificial Sequence: Synthetic peptide"
  MOD_RES (5)..(6): Citrulline
NNKLXXGDIIGVQGNP

SEQ ID NO: 3403 - protein, 16 aa, Artificial Sequence
  source: /note="Description of Artificial Sequence: Synthetic peptide"
  MOD_RES (1)..(2): Citrulline
XXGDIIGVQGNPGKTK

SEQ ID NO: 3404 - protein, 16 aa, Artificial Sequence
  source: /note="Description of Artificial Sequence: Synthetic peptide"
  MOD_RES (11)..(11): Citrulline
CPSGGQSQGPXGQFLD

SEQ ID NO: 3405 - protein, 16 aa, Artificial Sequence
  source: /note="Description of Artificial Sequence: Synthetic peptide"
  MOD_RES (7)..(7): Citrulline
GQSQGPXGQFLDTVLA

SEQ ID NO: 3406 - protein, 16 aa, Artificial Sequence
  source: /note="Description of Artificial Sequence: Synthetic peptide"
  MOD_RES (3)..(3): Citrulline
GPXGQFLDTVLAAMCP

SEQ ID NO: 3407 - protein, 16 aa, Artificial Sequence
  source: /note="Description of Artificial Sequence: Synthetic peptide"
  MOD_RES (8)..(8): Citrulline
QVCLFLKXGANQHATD

SEQ ID NO: 3408 - protein, 16 aa, Artificial Sequence
  source: /note="Description of Artificial Sequence: Synthetic peptide"
  MOD_RES (4)..(4): Citrulline
FLKXGANQHATDEEGK

SEQ ID NO: 3409 - protein, 16 aa, Artificial Sequence
  source: /note="Description of Artificial Sequence: Synthetic peptide"
  MOD_RES (8)..(8): Citrulline
  MOD_RES (13)..(13): Citrulline
EAFEKLPXGVLEXIMG

SEQ ID NO: 3410 - protein, 16 aa, Artificial Sequence
  source: /note="Description of Artificial Sequence: Synthetic peptide"
  MOD_RES (9)..(9): Citrulline
KYIQIKFVXGSTFKEI

SEQ ID NO: 3411 - protein, 16 aa, Artificial Sequence
  source: /note="Description of Artificial Sequence: Synthetic peptide"
  MOD_RES (5)..(5): Citrulline
IKFVXGSTFKEIPVTV

SEQ ID NO: 3412 - protein, 16 aa, Artificial Sequence
  source: /note="Description of Artificial Sequence: Synthetic peptide"
  MOD_RES (2)..(2): Citrulline
  MOD_RES (8)..(8): Citrulline
LXELSFGXGSTAPVGG

SEQ ID NO: 3413 - protein, 16 aa, Artificial Sequence
  source: /note="Description of Artificial Sequence: Synthetic peptide"
  MOD_RES (4)..(4): Citrulline
SFGXGSTAPVGGGAFP

SEQ ID NO: 3414 - protein, 16 aa, Artificial Sequence
  source: /note="Description of Artificial Sequence: Synthetic peptide"
  MOD_RES (15)..(15): Citrulline
VTADGFSASYKTLPXG

SEQ ID NO: 3415 - protein, 16 aa, Artificial Sequence
  source: /note="Description of Artificial Sequence: Synthetic peptide"
  MOD_RES (11)..(11): Citrulline
GFSASYKTLPXGTAKE

SEQ ID NO: 3416 - protein, 16 aa, Artificial Sequence
  source: /note="Description of Artificial Sequence: Synthetic peptide"
  MOD_RES (7)..(7): Citrulline
SYKTLPXGTAKEGQGP

SEQ ID NO: 3417 - protein, 16 aa, Artificial Sequence
  source: /note="Description of Artificial Sequence: Synthetic peptide"
  MOD_RES (3)..(3): Citrulline
  MOD_RES (16)..(16): Citrulline
LPXGTAKEGQGPGPKX

SEQ ID NO: 3418 - protein, 16 aa, Artificial Sequence
  source: /note="Description of Artificial Sequence: Synthetic peptide"
  MOD_RES (7)..(7): Citrulline
LEVAYQXGYLNKDTHD

SEQ ID NO: 3419 - protein, 16 aa, Artificial Sequence
  source: /note="Description of Artificial Sequence: Synthetic peptide"
  MOD_RES (3)..(3): Citrulline
YQXGYLNKDTHDQLSE

SEQ ID NO: 3420 - protein, 16 aa, Artificial Sequence
  source: /note="Description of Artificial Sequence: Synthetic peptide"
  MOD_RES (1)..(1): Citrulline
  MOD_RES (10)..(10): Citrulline
XLPVEVAYKXGLFDEE

SEQ ID NO: 3421 - protein, 16 aa, Artificial Sequence
  source: /note="Description of Artificial Sequence: Synthetic peptide"
  MOD_RES (6)..(6): Citrulline
EVAYKXGLFDEEMNEI

SEQ ID NO: 3422 - protein, 16 aa, Artificial Sequence
  source: /note="Description of Artificial Sequence: Synthetic peptide"
  MOD_RES (10)..(10): Citrulline
ELVECVGSTXGVLIEP

SEQ ID NO: 3423 - protein, 16 aa, Artificial Sequence
  source: /note="Description of Artificial Sequence: Synthetic peptide"
  MOD_RES (6)..(6): Citrulline
CVGSTXGVLIEPVYPD

SEQ ID NO: 3424 - protein, 16 aa, Artificial Sequence
  source: /note="Description of Artificial Sequence: Synthetic peptide"
  MOD_RES (13)..(13): Citrulline
GLEDFESLKVIGXGAF

SEQ ID NO: 3425 - protein, 16 aa, Artificial Sequence
  source: /note="Description of Artificial Sequence: Synthetic peptide"
  MOD_RES (9)..(9): Citrulline
  MOD_RES (16)..(16): Citrulline
FESLKVIGXGAFGEVX

SEQ ID NO: 3426 - protein, 16 aa, Artificial Sequence
  source: /note="Description of Artificial Sequence: Synthetic peptide"
  MOD_RES (5)..(5): Citrulline
  MOD_RES (12)..(12): Citrulline
KVIGXGAFGEVXLVQK

SEQ ID NO: 3427 - protein, 16 aa, Artificial Sequence
  source: /note="Description of Artificial Sequence: Synthetic peptide"
  MOD_RES (3)..(3): Citrulline
  MOD_RES (10)..(10): Citrulline
YKXFEGLTAXGAIPSY

SEQ ID NO: 3428 - protein, 16 aa, Artificial Sequence
  source: /note="Description of Artificial Sequence: Synthetic peptide"
  MOD_RES (6)..(6): Citrulline
EGLTAXGAIPSYMKAA

SEQ ID NO: 3429 - protein, 16 aa, Artificial Sequence
  source: /note="Description of Artificial Sequence: Synthetic peptide"
  MOD_RES (3)..(3): Citrulline
  MOD_RES (9)..(9): Citrulline
EVXVLQSLXGKICEAK

SEQ ID NO: 3430 - protein, 16 aa, Artificial Sequence
  source: /note="Description of Artificial Sequence: Synthetic peptide"
  MOD_RES (5)..(5): Citrulline
LQSLXGKICEAKNLLP

SEQ ID NO: 3431 - protein, 16 aa, Artificial Sequence
  source: /note="Description of Artificial Sequence: Synthetic peptide"
  MOD_RES (7)..(7): Citrulline
GSLDFQXGWKEYKMGF

SEQ ID NO: 3432 - protein, 16 aa, Artificial Sequence
  source: /note="Description of Artificial Sequence: Synthetic peptide"
  MOD_RES (3)..(3): Citrulline
FQXGWKEYKMGFGNPS

SEQ ID NO: 3433 - protein, 16 aa, Artificial Sequence
  source: /note="Description of Artificial Sequence: Synthetic peptide"
  MOD_RES (10)..(10): Citrulline
TKQQEIVVSXGKILEL

SEQ ID NO: 3434 - protein, 16 aa, Artificial Sequence
  source: /note="Description of Artificial Sequence: Synthetic peptide"
  MOD_RES (6)..(6): Citrulline
  MOD_RES (14)..(14): Citrulline
EIVVSXGKILELLXPD

SEQ ID NO: 3435 - protein, 16 aa, Artificial Sequence
  source: /note="Description of Artificial Sequence: Synthetic peptide"
  MOD_RES (11)..(11): Citrulline
SYKCDYPESYXGTLLK

SEQ ID NO: 3436 - protein, 16 aa, Artificial Sequence
  source: /note="Description of Artificial Sequence: Synthetic peptide"
  MOD_RES (7)..(7): Citrulline
DYPESYXGTLLKDFHM

SEQ ID NO: 3437 - protein, 16 aa, Artificial Sequence
  source: /note="Description of Artificial Sequence: Synthetic peptide"
  MOD_RES (3)..(3): Citrulline
SYXGTLLKDFHMSELS

SEQ ID NO: 3438 - protein, 16 aa, Artificial Sequence
  source: /note="Description of Artificial Sequence: Synthetic peptide"
  MOD_RES (7)..(7): Citrulline
  MOD_RES (9)..(9): Citrulline
EGTLIVXEXGEKVLQN

SEQ ID NO: 3439 - protein, 16 aa, Artificial Sequence
  source: /note="Description of Artificial Sequence: Synthetic peptide"
  MOD_RES (3)..(3): Citrulline
  MOD_RES (5)..(5): Citrulline
IVXEXGEKVLQNDEFT

SEQ ID NO: 3440 - protein, 16 aa, Artificial Sequence
  source: /note="Description of Artificial Sequence: Synthetic peptide"
  MOD_RES (8)..(8): Citrulline
  MOD_RES (14)..(14): Citrulline
GPGHMMNXGGMSGXGS

SEQ ID NO: 3441 - protein, 16 aa, Artificial Sequence
  source: /note="Description of Artificial Sequence: Synthetic peptide"
  MOD_RES (4)..(4): Citrulline
  MOD_RES (10)..(10): Citrulline
MMNXGGMSGXGSFAPG

SEQ ID NO: 3442 - protein, 16 aa, Artificial Sequence
  source: /note="Description of Artificial Sequence: Synthetic peptide"
  MOD_RES (6)..(6): Citrulline
  MOD_RES (16)..(16): Citrulline
GGMSGXGSFAPGGASX

SEQ ID NO: 3443 - protein, 16 aa, Artificial Sequence
  source: /note="Description of Artificial Sequence: Synthetic peptide"
  MOD_RES (2)..(2): Citrulline
  MOD_RES (12)..(12): Citrulline
GXGSFAPGGASXGHPI

SEQ ID NO: 3444 - protein, 16 aa, Artificial Sequence
  source: /note="Description of Artificial Sequence: Synthetic peptide"
  MOD_RES (14)..(14): Citrulline
PHGGMQGGFGGQSXGS

SEQ ID NO: 3445 - protein, 16 aa, Artificial Sequence
  source: /note="Description of Artificial Sequence: Synthetic peptide"
  MOD_RES (10)..(10): Citrulline
  MOD_RES (13)..(13): Citrulline
MQGGFGGQSXGSXPSD

SEQ ID NO: 3446 - protein, 16 aa, Artificial Sequence
  source: /note="Description of Artificial Sequence: Synthetic peptide"
  MOD_RES (12)..(12): Citrulline
NQHNAPIPQGGXGAIQ

SEQ ID NO: 3447 - protein, 16 aa, Artificial Sequence
  source: /note="Description of Artificial Sequence: Synthetic peptide"
  MOD_RES (8)..(8): Citrulline
APIPQGGXGAIQFVTQ

SEQ ID NO: 3448 - protein, 16 aa, Artificial Sequence
  source: /note="Description of Artificial Sequence: Synthetic peptide"
  MOD_RES (9)..(9): Citrulline
IWYHGAISXGDAENLL

SEQ ID NO: 3449 - protein, 16 aa, Artificial Sequence
  source: /note="Description of Artificial Sequence: Synthetic peptide"
  MOD_RES (12)..(12): Citrulline
  MOD_RES (16)..(16): Citrulline
EETSYCFKEKSXGVLX

SEQ ID NO: 3450 - protein, 16 aa, Artificial Sequence
  source: /note="Description of Artificial Sequence: Synthetic peptide"
  MOD_RES (8)..(8): Citrulline
  MOD_RES (12)..(12): Citrulline
YCFKEKSXGVLXEWYA

SEQ ID NO: 3451 - protein, 16 aa, Artificial Sequence
  source: /note="Description of Artificial Sequence: Synthetic peptide"
  MOD_RES (10)..(10): Citrulline
LTHNQGSVAXGGPSAT

SEQ ID NO: 3452 - protein, 16 aa, Artificial Sequence
  source: /note="Description of Artificial Sequence: Synthetic peptide"
  MOD_RES (9)..(10): Citrulline
DPNQFTISXXGAKISE

SEQ ID NO: 3453 - protein, 16 aa, Artificial Sequence
  source: /note="Description of Artificial Sequence: Synthetic peptide"
  MOD_RES (5)..(6): Citrulline
FTISXXGAKISETSSV

SEQ ID NO: 3454 - protein, 16 aa, Artificial Sequence
  source: /note="Description of Artificial Sequence: Synthetic peptide"
  MOD_RES (5)..(5): Citrulline
  MOD_RES (10)..(10): Citrulline
QVQQXTLMMXGQGLNM

SEQ ID NO: 3455 - protein, 16 aa, Artificial Sequence
  source: /note="Description of Artificial Sequence: Synthetic peptide"
  MOD_RES (1)..(1): Citrulline
  MOD_RES (6)..(6): Citrulline
XTLMMXGQGLNMTPSM

SEQ ID NO: 3456 - protein, 16 aa, Artificial Sequence
  source: /note="Description of Artificial Sequence: Synthetic peptide"
  MOD_RES (7)..(7): Citrulline
MLACLTXGNLLDVLQE

SEQ ID NO: 3457 - protein, 16 aa, Artificial Sequence
  source: /note="Description of Artificial Sequence: Synthetic peptide"
  MOD_RES (3)..(3): Citrulline
LTXGNLLDVLQEGFNE

SEQ ID NO: 3458 - protein, 16 aa, Artificial Sequence
  source: /note="Description of Artificial Sequence: Synthetic peptide"
  MOD_RES (8)..(8): Citrulline
VGLLIGPXGNTLKNIE

SEQ ID NO: 3459 - protein, 16 aa, Artificial Sequence
  source: /note="Description of Artificial Sequence: Synthetic peptide"
  MOD_RES (4)..(4): Citrulline
IGPXGNTLKNIEKECN

SEQ ID NO: 3460 - protein, 16 aa, Artificial Sequence
  source: /note="Description of Artificial Sequence: Synthetic peptide"
  MOD_RES (5)..(5): Citrulline
  MOD_RES (8)..(8): Citrulline
QATYXLLXGKDVEFPN

SEQ ID NO: 3461 - protein, 16 aa, Artificial Sequence
  source: /note="Description of Artificial Sequence: Synthetic peptide"
  MOD_RES (1)..(1): Citrulline
  MOD_RES (4)..(4): Citrulline
XLLXGKDVEFPNDYPS

SEQ ID NO: 3462 - protein, 16 aa, Artificial Sequence
  source: /note="Description of Artificial Sequence: Synthetic peptide"
  MOD_RES (13)..(13): Citrulline
EKMKEEKYDYISXGEN

SEQ ID NO: 3463 - protein, 16 aa, Artificial Sequence
  source: /note="Description of Artificial Sequence: Synthetic peptide"
  MOD_RES (9)..(9): Citrulline
EEKYDYISXGENPKGK

SEQ ID NO: 3464 - protein, 16 aa, Artificial Sequence
  source: /note="Description of Artificial Sequence: Synthetic peptide"
  MOD_RES (6)..(6): Citrulline
  MOD_RES (10)..(10): Citrulline
YETVMXQMKXGILHTD

SEQ ID NO: 3465 - protein, 16 aa, Artificial Sequence
  source: /note="Description of Artificial Sequence: Synthetic peptide"
  MOD_RES (2)..(2): Citrulline
  MOD_RES (6)..(6): Citrulline
MXQMKXGILHTDSQSQ

SEQ ID NO: 3466 - protein, 16 aa, Artificial Sequence
  source: /note="Description of Artificial Sequence: Synthetic peptide"
  MOD_RES (7)..(7): Citrulline
LSGELQXGDQILSVNG

SEQ ID NO: 3467 - protein, 16 aa, Artificial Sequence
  source: /note="Description of Artificial Sequence: Synthetic peptide"
  MOD_RES (3)..(3): Citrulline
  MOD_RES (16)..(16): Citrulline
LQXGDQILSVNGIDLX

SEQ ID NO: 3468 - protein, 16 aa, Artificial Sequence
  source: /note="Description of Artificial Sequence: Synthetic peptide"
  MOD_RES (6)..(6): Citrulline
SNGSSXGSSEEGPSGL

SEQ ID NO: 3469 - protein, 16 aa, Artificial Sequence
  source: /note="Description of Artificial Sequence: Synthetic peptide"
  MOD_RES (2)..(2): Citrulline
  MOD_RES (8)..(8): Citrulline
LXPGWPAXGQGWLEEE

SEQ ID NO: 3470 - protein, 16 aa, Artificial Sequence
  source: /note="Description of Artificial Sequence: Synthetic peptide"
  MOD_RES (4)..(4): Citrulline
WPAXGQGWLEEEDGED

SEQ ID NO: 3471 - protein, 16 aa, Artificial Sequence
  source: /note="Description of Artificial Sequence: Synthetic peptide"
  MOD_RES (10)..(11): Citrulline
LYSIYNANFXXGMKET

SEQ ID NO: 3472 - protein, 16 aa, Artificial Sequence
  source: /note="Description of Artificial Sequence: Synthetic peptide"
  MOD_RES (6)..(7): Citrulline
YNANFXXGMKETFCMS

SEQ ID NO: 3473 - protein, 16 aa, Artificial Sequence
  source: /note="Description of Artificial Sequence: Synthetic peptide"
  MOD_RES (2)..(2): Citrulline
  MOD_RES (11)..(11): Citrulline
SXHPGPGSFGXGGSLG

SEQ ID NO: 3474 - protein, 16 aa, Artificial Sequence
  source: /note="Description of Artificial Sequence: Synthetic peptide"
  MOD_RES (7)..(7): Citrulline
GPGSFGXGGSLGLGGG

SEQ ID NO: 3475 - protein, 16 aa, Artificial Sequence
  source: /note="Description of Artificial Sequence: Synthetic peptide"
  MOD_RES (9)..(9): Citrulline
NSSEKVFVXGTQDSSA

SEQ ID NO: 3476 - protein, 16 aa, Artificial Sequence
  source: /note="Description of Artificial Sequence: Synthetic peptide"
  MOD_RES (5)..(5): Citrulline
KVFVXGTQDSSAVPSA

SEQ ID NO: 3477 - protein, 16 aa, Artificial Sequence
  source: /note="Description of Artificial Sequence: Synthetic peptide"
  MOD_RES (12)..(12): Citrulline
PWFNGWGFNLPXGQSL

SEQ ID NO: 3478 - protein, 16 aa, Artificial Sequence
  source: /note="Description of Artificial Sequence: Synthetic peptide"
  MOD_RES (8)..(8): Citrulline
GWGFNLPXGQSLLDKW

SEQ ID NO: 3479 - protein, 16 aa, Artificial Sequence
  source: /note="Description of Artificial Sequence: Synthetic peptide"
  MOD_RES (4)..(4): Citrulline
NLPXGQSLLDKWNLIP

SEQ ID NO: 3480 - protein, 16 aa, Artificial Sequence
  source: /note="Description of Artificial Sequence: Synthetic peptide"
  MOD_RES (3)..(3): Citrulline
  MOD_RES (12)..(12): Citrulline
YAXQLFQEVMTXGTAS

SEQ ID NO: 3481 - protein, 16 aa, Artificial Sequence
  source: /note="Description of Artificial Sequence: Synthetic peptide"
  MOD_RES (8)..(8): Citrulline
LFQEVMTXGTASSPSY

SEQ ID NO: 3482 - protein, 16 aa, Artificial Sequence
  source: /note="Description of Artificial Sequence: Synthetic peptide"
  MOD_RES (13)..(13): Citrulline
SLGTMPVQVTPPXGAF

SEQ ID NO: 3483 - protein, 16 aa, Artificial Sequence
  source: /note="Description of Artificial Sequence: Synthetic peptide"
  MOD_RES (9)..(9): Citrulline
MPVQVTPPXGAFSPGM

SEQ ID NO: 3484 - protein, 16 aa, Artificial Sequence
  source: /note="Description of Artificial Sequence: Synthetic peptide"
  MOD_RES (5)..(5): Citrulline
VTPPXGAFSPGMGMQP

SEQ ID NO: 3485 - protein, 16 aa, Artificial Sequence
  source: /note="Description of Artificial Sequence: Synthetic peptide"
  MOD_RES (1)..(1): Citrulline
  MOD_RES (7)..(7): Citrulline
XNSMVSXGMTGNIGGQ

SEQ ID NO: 3486 - protein, 16 aa, Artificial Sequence
  source: /note="Description of Artificial Sequence: Synthetic peptide"
  MOD_RES (3)..(3): Citrulline
VSXGMTGNIGGQFGTG

SEQ ID NO: 3487 - protein, 16 aa, Artificial Sequence
  source: /note="Description of Artificial Sequence: Synthetic peptide"
  MOD_RES (11)..(11): Citrulline
  MOD_RES (15)..(15): Citrulline
GGWWEGELQAXGKKXQ

SEQ ID NO: 3488 - protein, 16 aa, Artificial Sequence
  source: /note="Description of Artificial Sequence: Synthetic peptide"
  MOD_RES (7)..(7): Citrulline
  MOD_RES (11)..(11): Citrulline
EGELQAXGKKXQIGWF

SEQ ID NO: 3489 - protein, 16 aa, Artificial Sequence
  source: /note="Description of Artificial Sequence: Synthetic peptide"
  MOD_RES (6)..(6): Citrulline
FAFKTXGKDAASSTKV

SEQ ID NO: 3490 - protein, 16 aa, Artificial Sequence
  source: /note="Description of Artificial Sequence: Synthetic peptide"
  MOD_RES (11)..(11): Citrulline
PSTHTMPHWVXGALLG

SEQ ID NO: 3491 - protein, 16 aa, Artificial Sequence
  source: /note="Description of Artificial Sequence: Synthetic peptide"
  MOD_RES (7)..(7): Citrulline
  MOD_RES (16)..(16): Citrulline
TMPHWVXGALLGCVPX

SEQ ID NO: 3492 - protein, 16 aa, Artificial Sequence
  source: /note="Description of Artificial Sequence: Synthetic peptide"
  MOD_RES (7)..(8): Citrulline
ASHNGQXXGLPKAVCM

SEQ ID NO: 3493 - protein, 16 aa, Artificial Sequence
  source: /note="Description of Artificial Sequence: Synthetic peptide"
  MOD_RES (3)..(4): Citrulline
GQXXGLPKAVCMNGTE

SEQ ID NO: 3494 - protein, 16 aa, Artificial Sequence
  source: /note="Description of Artificial Sequence: Synthetic peptide"
  MOD_RES (11)..(11): Citrulline
CLALGEEWGPXGGPSG

SEQ ID NO: 3495 - protein, 16 aa, Artificial Sequence
  source: /note="Description of Artificial Sequence: Synthetic peptide"
  MOD_RES (7)..(7): Citrulline
GEEWGPXGGPSGAGGS

SEQ ID NO: 3496 - protein, 16 aa, Artificial Sequence
  source: /note="Description of Artificial Sequence: Synthetic peptide"
  MOD_RES (3)..(3): Citrulline
GPXGGPSGAGGSGAGP

SEQ ID NO: 3497 - protein, 16 aa, Artificial Sequence
  source: /note="Description of Artificial Sequence: Synthetic peptide"
  MOD_RES (11)..(11): Citrulline
VVANSAFIAAXGSFDG

SEQ ID NO: 3498 - protein, 16 aa, Artificial Sequence
  source: /note="Description of Artificial Sequence: Synthetic peptide"
  MOD_RES (7)..(7): Citrulline
SAFIAAXGSFDGSSSQ

SEQ ID NO: 3499 - protein, 16 aa, Artificial Sequence
  source: /note="Description of Artificial Sequence: Synthetic peptide"
  MOD_RES (3)..(3): Citrulline
  MOD_RES (15)..(15): Citrulline
AAXGSFDGSSSQPSXD

SEQ ID NO: 3500 - protein, 16 aa, Artificial Sequence
  source: /note="Description of Artificial Sequence: Synthetic peptide"
  MOD_RES (6)..(6): Citrulline
FDWVLXGTSQVMFVNN

SEQ ID NO: 3501 - protein, 16 aa, Artificial Sequence
  source: /note="Description of Artificial Sequence: Synthetic peptide"
  MOD_RES (9)..(9): Citrulline
  MOD_RES (12)..(12): Citrulline
ALEKFEEEXISXGGSL

SEQ ID NO: 3502 - protein, 16 aa, Artificial Sequence
  source: /note="Description of Artificial Sequence: Synthetic peptide"
  MOD_RES (5)..(5): Citrulline
  MOD_RES (8)..(8): Citrulline
FEEEXISXGGSLKGDG

SEQ ID NO: 3503 - protein, 16 aa, Artificial Sequence
  source: /note="Description of Artificial Sequence: Synthetic peptide"
  MOD_RES (8)..(8): Citrulline
  MOD_RES (11)..(11): Citrulline
KSGQPHPXLAXGESYT

SEQ ID NO: 3504 - protein, 16 aa, Artificial Sequence
  source: /note="Description of Artificial Sequence: Synthetic peptide"
  MOD_RES (4)..(4): Citrulline
  MOD_RES (7)..(7): Citrulline
PHPXLAXGESYTCGYK

SEQ ID NO: 3505 - protein, 16 aa, Artificial Sequence
  source: /note="Description of Artificial Sequence: Synthetic peptide"
  MOD_RES (9)..(9): Citrulline
  MOD_RES (11)..(11): Citrulline
QGPDSFPDXFXGAELK

SEQ ID NO: 3506 - protein, 16 aa, Artificial Sequence
  source: /note="Description of Artificial Sequence: Synthetic peptide"
  MOD_RES (5)..(5): Citrulline
  MOD_RES (7)..(7): Citrulline
SFPDXFXGAELKEVSS

SEQ ID NO: 3507 - protein, 16 aa, Artificial Sequence
  source: /note="Description of Artificial Sequence: Synthetic peptide"
  MOD_RES (1)..(1): Citrulline
  MOD_RES (3)..(3): Citrulline
XFXGAELKEVSSQESN

SEQ ID NO: 3508 - protein, 16 aa, Artificial Sequence
  source: /note="Description of Artificial Sequence: Synthetic peptide"
  MOD_RES (7)..(7): Citrulline
  MOD_RES (12)..(12): Citrulline
FSKDHPXTGGEXGFLK

SEQ ID NO: 3509 - protein, 16 aa, Artificial Sequence
  source: /note="Description of Artificial Sequence: Synthetic peptide"
  MOD_RES (3)..(3): Citrulline
  MOD_RES (8)..(8): Citrulline
HPXTGGEXGFLKFNTI

SEQ ID NO: 3510 - protein, 16 aa, Artificial Sequence
  source: /note="Description of Artificial Sequence: Synthetic peptide"
  MOD_RES (7)..(7): Citrulline
  MOD_RES (9)..(9): Citrulline
ECNPDLXLXGHQKEGY

SEQ ID NO: 3511 - protein, 16 aa, Artificial Sequence
  source: /note="Description of Artificial Sequence: Synthetic peptide"
  MOD_RES (3)..(3): Citrulline
  MOD_RES (5)..(5): Citrulline
DLXLXGHQKEGYGLSW

SEQ ID NO: 3512 - protein, 16 aa, Artificial Sequence
  source: /note="Description of Artificial Sequence: Synthetic peptide"
  MOD_RES (14)..(14): Citrulline
GGQVGIFPSNYVSXGG

SEQ ID NO: 3513 - protein, 15 aa, Artificial Sequence
  source: /note="Description of Artificial Sequence: Synthetic peptide"
  MOD_RES (10)..(10): Citrulline
GIFPSNYVSXGGGPP

SEQ ID NO: 3514 - protein, 16 aa, Artificial Sequence
  source: /note="Description of Artificial Sequence: Synthetic peptide"
  MOD_RES (6)..(6): Citrulline
SNYVSXGGGPPPCEVA

SEQ ID NO: 3515 - protein, 16 aa, Artificial Sequence
  source: /note="Description of Artificial Sequence: Synthetic peptide"
  MOD_RES (9)..(9): Citrulline
  MOD_RES (13)..(13): Citrulline
IGGFGKVYXGSWXGEL

SEQ ID NO: 3516 - protein, 16 aa, Artificial Sequence
  source: /note="Description of Artificial Sequence: Synthetic peptide"
  MOD_RES (5)..(5): Citrulline
  MOD_RES (9)..(9): Citrulline
GKVYXGSWXGELVAVK

SEQ ID NO: 3517 - protein, 16 aa, Artificial Sequence
  source: /note="Description of Artificial Sequence: Synthetic peptide"
  MOD_RES (13)..(13): Citrulline
QQAADGTIFLVPXGTK

SEQ ID NO: 3518 - protein, 16 aa, Artificial Sequence
  source: /note="Description of Artificial Sequence: Synthetic peptide"
  MOD_RES (9)..(9): Citrulline
DGTIFLVPXGTKMEAT

SEQ ID NO: 3519 - protein, 13 aa, Artificial Sequence
  source: /note="Description of Artificial Sequence: Synthetic peptide"
  MOD_RES (5)..(5): Citrulline
FLVPXGTKMEATD

SEQ ID NO: 3520 - protein, 16 aa, Artificial Sequence
  source: /note="Description of Artificial Sequence: Synthetic peptide"
  MOD_RES (7)..(7): Citrulline
KCVPVCXGAEFFQAEN

SEQ ID NO: 3521 - protein, 16 aa, Artificial Sequence
  source: /note="Description of Artificial Sequence: Synthetic peptide"
  MOD_RES (3)..(3): Citrulline
VCXGAEFFQAENEGKG

SEQ ID NO: 3522 - protein, 16 aa, Artificial Sequence
  source: /note="Description of Artificial Sequence: Synthetic peptide"
  MOD_RES (4)..(4): Citrulline
  MOD_RES (11)..(11): Citrulline
QLDXLLPKLAXGSLSV

SEQ ID NO: 3523 - protein, 16 aa, Artificial Sequence
  source: /note="Description of Artificial Sequence: Synthetic peptide"
  MOD_RES (7)..(7): Citrulline
LLPKLAXGSLSVGDKD

SEQ ID NO: 3524 - protein, 16 aa, Artificial Sequence
  source: /note="Description of Artificial Sequence: Synthetic peptide"
  MOD_RES (3)..(3): Citrulline
LAXGSLSVGDKDHMCS

SEQ ID NO: 3525 - protein, 16 aa, Artificial Sequence
  source: /note="Description of Artificial Sequence: Synthetic peptide"
  MOD_RES (4)..(4): Citrulline
  MOD_RES (13)..(13): Citrulline
NLEXSSPLKKITXGMT

SEQ ID NO: 3526 - protein, 16 aa, Artificial Sequence
  source: /note="Description of Artificial Sequence: Synthetic peptide"
  MOD_RES (9)..(9): Citrulline
SSPLKKITXGMTNQSD

SEQ ID NO: 3527 - protein, 16 aa, Artificial Sequence
  source: /note="Description of Artificial Sequence: Synthetic peptide"
  MOD_RES (5)..(5): Citrulline
KKITXGMTNQSDTDNF

SEQ ID NO: 3528 - protein, 16 aa, Artificial Sequence
  source: /note="Description of Artificial Sequence: Synthetic peptide"
  MOD_RES (9)..(9): Citrulline
  MOD_RES (16)..(16): Citrulline
QDIFVFCTXGELSKYX

SEQ ID NO: 3529 - protein, 16 aa, Artificial Sequence
  source: /note="Description of Artificial Sequence: Synthetic peptide"
  MOD_RES (5)..(5): Citrulline
  MOD_RES (12)..(12): Citrulline
VFCTXGELSKYXVPNL

SEQ ID NO: 3530 - protein, 16 aa, Artificial Sequence
  source: /note="Description of Artificial Sequence: Synthetic peptide"
  MOD_RES (8)..(8): Citrulline
AAESLLLXGAGAAGGA

SEQ ID NO: 3531 - protein, 16 aa, Artificial Sequence
  source: /note="Description of Artificial Sequence: Synthetic peptide"
  MOD_RES (4)..(4): Citrulline
LLLXGAGAAGGAGDPA

SEQ ID NO: 3532 - protein, 16 aa, Artificial Sequence
  source: /note="Description of Artificial Sequence: Synthetic peptide"
  MOD_RES (8)..(8): Citrulline
AFAASNVXGSLNVNLN

SEQ ID NO: 3533 - protein, 16 aa, Artificial Sequence
  source: /note="Description of Artificial Sequence: Synthetic peptide"
  MOD_RES (8)..(9): Citrulline
CEGCNCSXXGTIEAAM

SEQ ID NO: 3534 - protein, 16 aa, Artificial Sequence
  source: /note="Description of Artificial Sequence: Synthetic peptide"
  MOD_RES (8)..(8): Citrulline
  MOD_RES (14)..(14): Citrulline
SEDWKLVXSASFSXGG

SEQ ID NO: 3535 - protein, 16 aa, Artificial Sequence
  source: /note="Description of Artificial Sequence: Synthetic peptide"
  MOD_RES (4)..(4): Citrulline
  MOD_RES (10)..(10): Citrulline
KLVXSASFSXGGQLSF

SEQ ID NO: 3536 - protein, 16 aa, Artificial Sequence
  source: /note="Description of Artificial Sequence: Synthetic peptide"
  MOD_RES (6)..(6): Citrulline
SASFSXGGQLSFTDLG

SEQ ID NO: 3537 - protein, 16 aa, Artificial Sequence
  source: /note="Description of Artificial Sequence: Synthetic peptide"
  MOD_RES (2)..(2): Citrulline
SXGGQLSFTDLGLPPT

SEQ ID NO: 3538 - protein, 16 aa, Artificial Sequence
  source: /note="Description of Artificial Sequence: Synthetic peptide"
  MOD_RES (8)..(8): Citrulline
QLPPGGAXGQLGNWMS

SEQ ID NO: 3539 - protein, 16 aa, Artificial Sequence
  source: /note="Description of Artificial Sequence: Synthetic peptide"
  MOD_RES (4)..(4): Citrulline
GGAXGQLGNWMSPADF

SEQ ID NO: 3540 - protein, 16 aa, Artificial Sequence
  source: /note="Description of Artificial Sequence: Synthetic peptide"
  MOD_RES (8)..(8): Citrulline
  MOD_RES (10)..(10): Citrulline
HCCFYKHXGXNLVTMT

SEQ ID NO: 3541 - protein, 16 aa, Artificial Sequence
  source: /note="Description of Artificial Sequence: Synthetic peptide"
  MOD_RES (9)..(9): Citrulline
  MOD_RES (11)..(11): Citrulline
GGDPGLSPXGXEFAKS

SEQ ID NO: 3542 - protein, 16 aa, Artificial Sequence
  source: /note="Description of Artificial Sequence: Synthetic peptide"
  MOD_RES (5)..(5): Citrulline
  MOD_RES (7)..(7): Citrulline
GLSPXGXEFAKSLAQF

SEQ ID NO: 3543 - protein, 16 aa, Artificial Sequence
  source: /note="Description of Artificial Sequence: Synthetic peptide"
  MOD_RES (5)..(5): Citrulline
  MOD_RES (7)..(7): Citrulline
AEAPXGXVLFEEIKVP

SEQ ID NO: 3544 - protein, 16 aa, Artificial Sequence
  source: /note="Description of Artificial Sequence: Synthetic peptide"
  MOD_RES (1)..(1): Citrulline
  MOD_RES (3)..(3): Citrulline
XGXVLFEEIKVPSAMA

SEQ ID NO: 3545 - protein, 16 aa, Artificial Sequence
  source: /note="Description of Artificial Sequence: Synthetic peptide"
  MOD_RES (13)..(13): Citrulline
AGEGHHTGDLAHXGKL

SEQ ID NO: 3546 - protein, 16 aa, Artificial Sequence
  source: /note="Description of Artificial Sequence: Synthetic peptide"
  MOD_RES (12)..(12): Citrulline
  MOD_RES (15)..(15): Citrulline
GPAGIPGPSGKXGPXG

SEQ ID NO: 3547 - protein, 16 aa, Artificial Sequence
  source: /note="Description of Artificial Sequence: Synthetic peptide"
  MOD_RES (8)..(8): Citrulline
  MOD_RES (11)..(11): Citrulline
IPGPSGKXGPXGIPGP

SEQ ID NO: 3548 - protein, 16 aa, Artificial Sequence
  source: /note="Description of Artificial Sequence: Synthetic peptide"
  MOD_RES (4)..(4): Citrulline
  MOD_RES (7)..(7): Citrulline
SGKXGPXGIPGPHGNP

SEQ ID NO: 3549 - protein, 16 aa, Artificial Sequence
  source: /note="Description of Artificial Sequence: Synthetic peptide"
  MOD_RES (2)..(2): Citrulline
  MOD_RES (14)..(14): Citrulline
AXGPPGSQGPKGQXGS

SEQ ID NO: 3550 - protein, 16 aa, Artificial Sequence
  source: /note="Description of Artificial Sequence: Synthetic peptide"
  MOD_RES (10)..(10): Citrulline
  MOD_RES (13)..(13): Citrulline
PGSQGPKGQXGSXGPD

SEQ ID NO: 3551 - protein, 16 aa, Artificial Sequence
  source: /note="Description of Artificial Sequence: Synthetic peptide"
  MOD_RES (6)..(6): Citrulline
  MOD_RES (9)..(9): Citrulline
GPKGQXGSXGPDGLLG

SEQ ID NO: 3552 - protein, 16 aa, Artificial Sequence
  source: /note="Description of Artificial Sequence: Synthetic peptide"
  MOD_RES (2)..(2): Citrulline
  MOD_RES (5)..(5): Citrulline
QXGSXGPDGLLGEQGI

SEQ ID NO: 3553 - protein, 16 aa, Artificial Sequence
  source: /note="Description of Artificial Sequence: Synthetic peptide"
  MOD_RES (8)..(8): Citrulline
  MOD_RES (11)..(11): Citrulline
KSGPKGAXGTXGAVGH

SEQ ID NO: 3554 - protein, 16 aa, Artificial Sequence
  source: /note="Description of Artificial Sequence: Synthetic peptide"
  MOD_RES (4)..(4): Citrulline
  MOD_RES (7)..(7): Citrulline
KGAXGTXGAVGHLGLM

SEQ ID NO: 3555 - protein, 16 aa, Artificial Sequence
  source: /note="Description of Artificial Sequence: Synthetic peptide"
  MOD_RES (3)..(3): Citrulline
GTXGAVGHLGLMGPDG

SEQ ID NO: 3556 - protein, 16 aa, Artificial Sequence
  source: /note="Description of Artificial Sequence: Synthetic peptide"
  MOD_RES (8)..(8): Citrulline
  MOD_RES (13)..(13): Citrulline
KQGLPGIXGGPGXTGL

SEQ ID NO: 3557 - protein, 16 aa, Artificial Sequence
  source: /note="Description of Artificial Sequence: Synthetic peptide"
  MOD_RES (4)..(4): Citrulline
  MOD_RES (9)..(9): Citrulline
PGIXGGPGXTGLAGAP

SEQ ID NO: 3558 - protein, 16 aa, Artificial Sequence
  source: /note="Description of Artificial Sequence: Synthetic peptide"
  MOD_RES (12)..(12): Citrulline
  MOD_RES (15)..(15): Citrulline
GLPGQPGIQGKXGHXG

SEQ ID NO: 3559 - protein, 16 aa, Artificial Sequence
  source: /note="Description of Artificial Sequence: Synthetic peptide"
  MOD_RES (8)..(8): Citrulline
  MOD_RES (11)..(11): Citrulline
QPGIQGKXGHXGAQGD

SEQ ID NO: 3560 - protein, 16 aa, Artificial Sequence
  source: /note="Description of Artificial Sequence: Synthetic peptide"
  MOD_RES (4)..(4): Citrulline
  MOD_RES (7)..(7): Citrulline
QGKXGHXGAQGDQGPC

SEQ ID NO: 3561 - protein, 16 aa, Artificial Sequence
  source: /note="Description of Artificial Sequence: Synthetic peptide"
  MOD_RES (9)..(9): Citrulline
  MOD_RES (13)..(13): Citrulline
EGIIGPTGXTGPXGEK

SEQ ID NO: 3562 - protein, 16 aa, Artificial Sequence
  source: /note="Description of Artificial Sequence: Synthetic peptide"
  MOD_RES (3)..(3): Citrulline
  MOD_RES (12)..(12): Citrulline
GFXGETGPQGPXGQPG

SEQ ID NO: 3563 - protein, 16 aa, Artificial Sequence
  source: /note="Description of Artificial Sequence: Synthetic peptide"
  MOD_RES (2)..(2): Citrulline
  MOD_RES (10)..(10): Citrulline
DXAMSWKYSXGAGLGF

SEQ ID NO: 3564 - protein, 16 aa, Artificial Sequence
  source: /note="Description of Artificial Sequence: Synthetic peptide"
  MOD_RES (6)..(6): Citrulline
SWKYSXGAGLGFSTAP

SEQ ID NO: 3565 - protein, 16 aa, Artificial Sequence
  source: /note="Description of Artificial Sequence: Synthetic peptide"
  MOD_RES (11)..(11): Citrulline
ENIPPNSQQTXGSLGI

SEQ ID NO: 3566 - protein, 16 aa, Artificial Sequence
  source: /note="Description of Artificial Sequence: Synthetic peptide"
  MOD_RES (7)..(7): Citrulline
PNSQQTXGSLGIDYGL

SEQ ID NO: 3567 - protein, 16 aa, Artificial Sequence
  source: /note="Description of Artificial Sequence: Synthetic peptide"
  MOD_RES (3)..(3): Citrulline
QTXGSLGIDYGLSLPL

SEQ ID NO: 3568 - protein, 16 aa, Artificial Sequence
  source: /note="Description of Artificial Sequence: Synthetic peptide"
  MOD_RES (11)..(11): Citrulline
HMQTQSSPFAXGNVFG

SEQ ID NO: 3569 - protein, 16 aa, Artificial Sequence
  source: /note="Description of Artificial Sequence: Synthetic peptide"
  MOD_RES (7)..(7): Citrulline
QSSPFAXGNVFGEPPT

SEQ ID NO: 3570 - protein, 16 aa, Artificial Sequence
  source: /note="Description of Artificial Sequence: Synthetic peptide"
  MOD_RES (3)..(3): Citrulline
FAXGNVFGEPPTELQI

SEQ ID NO: 3571 - protein, 16 aa, Artificial Sequence
  source: /note="Description of Artificial Sequence: Synthetic peptide"
  MOD_RES (4)..(4): Citrulline
  MOD_RES (11)..(11): Citrulline
IIYXQKCEFVXGSGAD

SEQ ID NO: 3572 - protein, 16 aa, Artificial Sequence
  source: /note="Description of Artificial Sequence: Synthetic peptide"
  MOD_RES (7)..(7): Citrulline
  MOD_RES (15)..(15): Citrulline
QKCEFVXGSGADGPXA

SEQ ID NO: 3573 - protein, 16 aa, Artificial Sequence
  source: /note="Description of Artificial Sequence: Synthetic peptide"
  MOD_RES (12)..(12): Citrulline
VAGSVGGNTGVXGKFE

SEQ ID NO: 3574 - protein, 16 aa, Artificial Sequence
  source: /note="Description of Artificial Sequence: Synthetic peptide"
  MOD_RES (8)..(8): Citrulline
  MOD_RES (13)..(13): Citrulline
VGGNTGVXGKFEXAEE

SEQ ID NO: 3575 - protein, 16 aa, Artificial Sequence
  source: /note="Description of Artificial Sequence: Synthetic peptide"
  MOD_RES (13)..(13): Citrulline
CLHDCPPGYFGIXGQE

SEQ ID NO: 3576 - protein, 16 aa, Artificial Sequence
  source: /note="Description of Artificial Sequence: Synthetic peptide"
  MOD_RES (9)..(9): Citrulline
  MOD_RES (15)..(15): Citrulline
CPPGYFGIXGQEVNXC

SEQ ID NO: 3577 - protein, 16 aa, Artificial Sequence
  source: /note="Description of Artificial Sequence: Synthetic peptide"
  MOD_RES (5)..(5): Citrulline
  MOD_RES (11)..(11): Citrulline
YFGIXGQEVNXCKKCG

SEQ ID NO: 3578 - protein, 16 aa, Artificial Sequence
  source: /note="Description of Artificial Sequence: Synthetic peptide"
  MOD_RES (12)..(12): Citrulline
CPNEGCTSQVPXGTLA

SEQ ID NO: 3579 - protein, 16 aa, Artificial Sequence
  source: /note="Description of Artificial Sequence: Synthetic peptide"
  MOD_RES (8)..(8): Citrulline
  MOD_RES (15)..(15): Citrulline
GCTSQVPXGTLAEHXQ

SEQ ID NO: 3580 - protein, 16 aa, Artificial Sequence
  source: /note="Description of Artificial Sequence: Synthetic peptide"
  MOD_RES (8)..(8): Citrulline
  MOD_RES (14)..(14): Citrulline
VDFYSELXNKGFQXGA

SEQ ID NO: 3581 - protein, 16 aa, Artificial Sequence
  source: /note="Description of Artificial Sequence: Synthetic peptide"
  MOD_RES (4)..(4): Citrulline
  MOD_RES (10)..(10): Citrulline
SELXNKGFQXGASQEL

SEQ ID NO: 3582 - protein, 16 aa, Artificial Sequence
  source: /note="Description of Artificial Sequence: Synthetic peptide"
  MOD_RES (6)..(6): Citrulline
NKGFQXGASQELKEAV

SEQ ID NO: 3583 - protein, 16 aa, Artificial Sequence
  source: /note="Description of Artificial Sequence: Synthetic peptide"
  MOD_RES (2)..(2): Citrulline
  MOD_RES (8)..(8): Citrulline
EXLAVSTXGKKYGVNE

SEQ ID NO: 3584 - protein, 16 aa, Artificial Sequence
  source: /note="Description of Artificial Sequence: Synthetic peptide"
  MOD_RES (4)..(4): Citrulline
VSTXGKKYGVNEVCSP

SEQ ID NO: 3585 - protein, 16 aa, Artificial Sequence
  source: /note="Description of Artificial Sequence: Synthetic peptide"
  MOD_RES (14)..(14): Citrulline
DPLTCGGQNAFQKXGN

SEQ ID NO: 3586 - protein, 16 aa, Artificial Sequence
  source: /note="Description of Artificial Sequence: Synthetic peptide"
  MOD_RES (10)..(10): Citrulline
CGGQNAFQKXGNQVPP

SEQ ID NO: 3587 - protein, 16 aa, Artificial Sequence
  source: /note="Description of Artificial Sequence: Synthetic peptide"
  MOD_RES (6)..(6): Citrulline
NAFQKXGNQVPPKMFA

SEQ ID NO: 3588 - protein, 16 aa, Artificial Sequence
  source: /note="Description of Artificial Sequence: Synthetic peptide"
  MOD_RES (12)..(12): Citrulline
  MOD_RES (16)..(16): Citrulline
FVPIVPALQKTXGDSX

SEQ ID NO: 3589 - protein, 16 aa, Artificial Sequence
  source: /note="Description of Artificial Sequence: Synthetic peptide"
  MOD_RES (8)..(8): Citrulline
  MOD_RES (12)..(12): Citrulline
VPALQKTXGDSXPAEA

SEQ ID NO: 3590 - protein, 16 aa, Artificial Sequence
  source: /note="Description of Artificial Sequence: Synthetic peptide"
  MOD_RES (13)..(13): Citrulline
SFYNWMSNAVGNXGSV

SEQ ID NO: 3591 - protein, 16 aa, Artificial Sequence
  source: /note="Description of Artificial Sequence: Synthetic peptide"
  MOD_RES (9)..(9): Citrulline
WMSNAVGNXGSVLQES

SEQ ID NO: 3592 - protein, 16 aa, Artificial Sequence
  source: /note="Description of Artificial Sequence: Synthetic peptide"
  MOD_RES (5)..(5): Citrulline
AVGNXGSVLQESPVTK

SEQ ID NO: 3593 - protein, 16 aa, Artificial Sequence
  source: /note="Description of Artificial Sequence: Synthetic peptide"
  MOD_RES (1)..(1): Citrulline
XGSVLQESPVTKSGHN

SEQ ID NO: 3594 - protein, 16 aa, Artificial Sequence
  source: /note="Description of Artificial Sequence: Synthetic peptide"
  MOD_RES (7)..(7): Citrulline
  MOD_RES (13)..(13): Citrulline
ESPNASXGSSLPXTLS

SEQ ID NO: 3595 - protein, 16 aa, Artificial Sequence
  source: /note="Description of Artificial Sequence: Synthetic peptide"
  MOD_RES (1)..(1): Citrulline
  MOD_RES (10)..(10): Citrulline
XTTIPKWLQXGVMDPL

SEQ ID NO: 3596 - protein, 16 aa, Artificial Sequence
  source: /note="Description of Artificial Sequence: Synthetic peptide"
  MOD_RES (6)..(6): Citrulline
PKWLQXGVMDPLDKVL

SEQ ID NO: 3597 - protein, 16 aa, Artificial Sequence
  source: /note="Description of Artificial Sequence: Synthetic peptide"
  MOD_RES (13)..(13): Citrulline
GGSSFGGVSGFGXGSG

SEQ ID NO: 3598 - protein, 16 aa, Artificial Sequence
  source: /note="Description of Artificial Sequence: Synthetic peptide"
  MOD_RES (9)..(9): Citrulline
FGGVSGFGXGSGFCGS

SEQ ID NO: 3599 - protein, 16 aa, Artificial Sequence
  source: /note="Description of Artificial Sequence: Synthetic peptide"
  MOD_RES (12)..(12): Citrulline
SGKQPWFCAWKXGSEF

SEQ ID NO: 3600 - protein, 16 aa, Artificial Sequence
  source: /note="Description of Artificial Sequence: Synthetic peptide"
  MOD_RES (8)..(8): Citrulline
PWFCAWKXGSEFLMTP

SEQ ID NO: 3601 - protein, 16 aa, Artificial Sequence
  source: /note="Description of Artificial Sequence: Synthetic peptide"
  MOD_RES (6)..(6): Citrulline
  MOD_RES (14)..(14): Citrulline
DVFILXGLSLSIEXGK

SEQ ID NO: 3602 - protein, 16 aa, Artificial Sequence
  source: /note="Description of Artificial Sequence: Synthetic peptide"
  MOD_RES (2)..(2): Citrulline
  MOD_RES (10)..(10): Citrulline
LXGLSLSIEXGKTVAF

SEQ ID NO: 3603 - protein, 16 aa, Artificial Sequence
  source: /note="Description of Artificial Sequence: Synthetic peptide"
  MOD_RES (2)..(2): Citrulline
  MOD_RES (9)..(9): Citrulline
EXFFDPNQXGKALHQK

SEQ ID NO: 3604 - protein, 16 aa, Artificial Sequence
  source: /note="Description of Artificial Sequence: Synthetic peptide"
  MOD_RES (5)..(5): Citrulline
  MOD_RES (16)..(16): Citrulline
DPNQXGKALHQKQALX

SEQ ID NO: 3605 - protein, 16 aa, Artificial Sequence
  source: /note="Description of Artificial Sequence: Synthetic peptide"
  MOD_RES (7)..(7): Citrulline
ALAALGXGSLTPSSSS

SEQ ID NO: 3606 - protein, 16 aa, Artificial Sequence
  source: /note="Description of Artificial Sequence: Synthetic peptide"
  MOD_RES (3)..(3): Citrulline
LGXGSLTPSSSSSSSS

SEQ ID NO: 3607 - protein, 16 aa, Artificial Sequence
  source: /note="Description of Artificial Sequence: Synthetic peptide"
  MOD_RES (4)..(4): Citrulline
  MOD_RES (12)..(12): Citrulline
CVVXFAKTGALXGAAL

SEQ ID NO: 3608 - protein, 16 aa, Artificial Sequence
  source: /note="Description of Artificial Sequence: Synthetic peptide"
  MOD_RES (8)..(8): Citrulline
FAKTGALXGAALGPPA

SEQ ID NO: 3609 - protein, 16 aa, Artificial Sequence
  source: /note="Description of Artificial Sequence: Synthetic peptide"
  MOD_RES (4)..(4): Citrulline
GALXGAALGPPAALPA

SEQ ID NO: 3610 - protein, 16 aa, Artificial Sequence
  source: /note="Description of Artificial Sequence: Synthetic peptide"
  MOD_RES (3)..(3): Citrulline
  MOD_RES (10)..(10): Citrulline
AGXSMLVVAXGSQWEP

SEQ ID NO: 3611 - protein, 16 aa, Artificial Sequence
  source: /note="Description of Artificial Sequence: Synthetic peptide"
  MOD_RES (6)..(6): Citrulline
  MOD_RES (14)..(14): Citrulline
MLVVAXGSQWEPAXWD

SEQ ID NO: 3612 - protein, 16 aa, Artificial Sequence
  source: /note="Description of Artificial Sequence: Synthetic peptide"
  MOD_RES (2)..(2): Citrulline
  MOD_RES (10)..(10): Citrulline
AXGSQWEPAXWDTTLP

SEQ ID NO: 3613 - protein, 16 aa, Artificial Sequence
  source: /note="Description of Artificial Sequence: Synthetic peptide"
  MOD_RES (11)..(11): Citrulline
VGTLKISGYVXGQTLN

SEQ ID NO: 3614 - protein, 16 aa, Artificial Sequence
  source: /note="Description of Artificial Sequence: Synthetic peptide"
  MOD_RES (7)..(7): Citrulline
  MOD_RES (15)..(15): Citrulline
KISGYVXGQTLNVNXL

SEQ ID NO: 3615 - protein, 16 aa, Artificial Sequence
  source: /note="Description of Artificial Sequence: Synthetic peptide"
  MOD_RES (6)..(6): Citrulline
FPLNPXGIKPQKDPDM

SEQ ID NO: 3616 - protein, 16 aa, Artificial Sequence
  source: /note="Description of Artificial Sequence: Synthetic peptide"
  MOD_RES (2)..(2): Citrulline
PXGIKPQKDPDMAMEI

SEQ ID NO: 3617 - protein, 16 aa, Artificial Sequence
  source: /note="Description of Artificial Sequence: Synthetic peptide"
  MOD_RES (7)..(7): Citrulline
ICWTVTXGEGLSPIES

SEQ ID NO: 3618 - protein, 16 aa, Artificial Sequence
  source: /note="Description of Artificial Sequence: Synthetic peptide"
  MOD_RES (3)..(3): Citrulline
VTXGEGLSPIESCEGL

SEQ ID NO: 3619 - protein, 16 aa, Artificial Sequence
  source: /note="Description of Artificial Sequence: Synthetic peptide"
  MOD_RES (9)..(9): Citrulline
EEVTLPKLXGGLMTID

SEQ ID NO: 3620 - protein, 16 aa, Artificial Sequence
  source: /note="Description of Artificial Sequence: Synthetic peptide"
  MOD_RES (5)..(5): Citrulline
LPKLXGGLMTIDPSLD

SEQ ID NO: 3621 - protein, 16 aa, Artificial Sequence
  source: /note="Description of Artificial Sequence: Synthetic peptide"
  MOD_RES (11)..(11): Citrulline
ASHATFSLSGXGQSLD

SEQ ID NO: 3622 - protein, 16 aa, Artificial Sequence
  source: /note="Description of Artificial Sequence: Synthetic peptide"
  MOD_RES (7)..(7): Citrulline
TFSLSGXGQSLDHDEA

SEQ ID NO: 3623 - protein, 16 aa, Artificial Sequence
  source: /note="Description of Artificial Sequence: Synthetic peptide"
  MOD_RES (11)..(11): Citrulline
WTIPVYSAQPXGDPQQ

SEQ ID NO: 3624 - protein, 16 aa, Artificial Sequence
  source: /note="Description of Artificial Sequence: Synthetic peptide"
  MOD_RES (7)..(7): Citrulline
VYSAQPXGDPQQQSIT

SEQ ID NO: 3625 - protein, 16 aa, Artificial Sequence
  source: /note="Description of Artificial Sequence: Synthetic peptide"
  MOD_RES (13)..(13): Citrulline
YIQEQNEKIFAPXGLL

SEQ ID NO: 3626 - protein, 16 aa, Artificial Sequence
  source: /note="Description of Artificial Sequence: Synthetic peptide"
  MOD_RES (9)..(9): Citrulline
QNEKIFAPXGLLLTDP

SEQ ID NO: 3627 - protein, 16 aa, Artificial Sequence
  source: /note="Description of Artificial Sequence: Synthetic peptide"
  MOD_RES (5)..(5): Citrulline
  MOD_RES (15)..(15): Citrulline
IFAPXGLLLTDPVEXG

SEQ ID NO: 3628 - protein, 16 aa, Artificial Sequence
  source: /note="Description of Artificial Sequence: Synthetic peptide"
  MOD_RES (10)..(10): Citrulline
LSWTKKFKAXGVQDTD

SEQ ID NO: 3629 - protein, 16 aa, Artificial Sequence
  source: /note="Description of Artificial Sequence: Synthetic peptide"
  MOD_RES (6)..(6): Citrulline
  MOD_RES (16)..(16): Citrulline
KKFKAXGVQDTDVVSX

SEQ ID NO: 3630 - protein, 16 aa, Artificial Sequence
  source: /note="Description of Artificial Sequence: Synthetic peptide"
  MOD_RES (9)..(9): Citrulline
  MOD_RES (12)..(12): Citrulline
CYLDDTQSXALXGVSF

SEQ ID NO: 3631 - protein, 16 aa, Artificial Sequence
  source: /note="Description of Artificial Sequence: Synthetic peptide"
  MOD_RES (7)..(7): Citrulline
  MOD_RES (14)..(14): Citrulline
TSVSCFXGKGEGYXGT

SEQ ID NO: 3632 - protein, 16 aa, Artificial Sequence
  source: /note="Description of Artificial Sequence: Synthetic peptide"
  MOD_RES (3)..(3): Citrulline
  MOD_RES (10)..(10): Citrulline
CFXGKGEGYXGTANTT

SEQ ID NO: 3633 - protein, 16 aa, Artificial Sequence
  source: /note="Description of Artificial Sequence: Synthetic peptide"
  MOD_RES (5)..(5): Citrulline
  MOD_RES (14)..(14): Citrulline
GLSIXGPKGVQGPXGP

SEQ ID NO: 3634 - protein, 16 aa, Artificial Sequence
  source: /note="Description of Artificial Sequence: Synthetic peptide"
  MOD_RES (11)..(11): Citrulline
IQAVTAVDTKXGVKPW

SEQ ID NO: 3635 - protein, 16 aa, Artificial Sequence
  source: /note="Description of Artificial Sequence: Synthetic peptide"
  MOD_RES (7)..(7): Citrulline
TAVDTKXGVKPWSNIM

SEQ ID NO: 3636 - protein, 16 aa, Artificial Sequence
  source: /note="Description of Artificial Sequence: Synthetic peptide"
  MOD_RES (2)..(2): Citrulline
NXGSVKAFAEKFNSGD

SEQ ID NO: 3637 - protein, 16 aa, Artificial Sequence
  source: /note="Description of Artificial Sequence: Synthetic peptide"
  MOD_RES (11)..(11): Citrulline
AEKFNSGDLGXGSISP

SEQ ID NO: 3638 - protein, 16 aa, Artificial Sequence
  source: /note="Description of Artificial Sequence: Synthetic peptide"
  MOD_RES (7)..(7): Citrulline
NSGDLGXGSISPDAEP

SEQ ID NO: 3639 - protein, 16 aa, Artificial Sequence
  source: /note="Description of Artificial Sequence: Synthetic peptide"
  MOD_RES (3)..(3): Citrulline
LGXGSISPDAEPNDKV

SEQ ID NO: 3640 - protein, 16 aa, Artificial Sequence
  source: /note="Description of Artificial Sequence: Synthetic peptide"
  MOD_RES (5)..(5): Citrulline
  MOD_RES (12)..(12): Citrulline
VFQLXAHMYQAXGLIA

SEQ ID NO: 3641 - protein, 16 aa, Artificial Sequence
  source: /note="Description of Artificial Sequence: Synthetic peptide"
  MOD_RES (1)..(1): Citrulline
  MOD_RES (8)..(8): Citrulline
XAHMYQAXGLIAADSN

SEQ ID NO: 3642 - protein, 16 aa, Artificial Sequence
  source: /note="Description of Artificial Sequence: Synthetic peptide"
  MOD_RES (4)..(4): Citrulline
YQAXGLIAADSNGLSD

SEQ ID NO: 3643 - protein, 16 aa, Artificial Sequence
  source: /note="Description of Artificial Sequence: Synthetic peptide"
  MOD_RES (9)..(9): Citrulline
SLASHGHTXGSLTGSE

SEQ ID NO: 3644 - protein, 16 aa, Artificial Sequence
  source: /note="Description of Artificial Sequence: Synthetic peptide"
  MOD_RES (5)..(5): Citrulline
HGHTXGSLTGSEADNE

SEQ ID NO: 3645 - protein, 16 aa, Artificial Sequence
  source: /note="Description of Artificial Sequence: Synthetic peptide"
  MOD_RES (1)..(1): Citrulline
  MOD_RES (7)..(7): Citrulline
XECQLVXGACKPECNS

SEQ ID NO: 3646 - protein, 16 aa, Artificial Sequence
  source: /note="Description of Artificial Sequence: Synthetic peptide"
  MOD_RES (3)..(3): Citrulline
LVXGACKPECNSWEYV

SEQ ID NO: 3647 - protein, 16 aa, Artificial Sequence
  source: /note="Description of Artificial Sequence: Synthetic peptide"
  MOD_RES (14)..(14): Citrulline
SGTENPHGVKAVTXGQ

SEQ ID NO: 3648 - protein, 16 aa, Artificial Sequence
  source: /note="Description of Artificial Sequence: Synthetic peptide"
  MOD_RES (3)..(3): Citrulline
  MOD_RES (10)..(10): Citrulline
LVXSGSTESXGGKDPL

SEQ ID NO: 3649 - protein, 16 aa, Artificial Sequence
  source: /note="Description of Artificial Sequence: Synthetic peptide"
  MOD_RES (9)..(9): Citrulline
  MOD_RES (11)..(11): Citrulline
GISVKMFLXGXPITMY

SEQ ID NO: 3650 - protein, 16 aa, Artificial Sequence
  source: /note="Description of Artificial Sequence: Synthetic peptide"
  MOD_RES (5)..(5): Citrulline
  MOD_RES (7)..(7): Citrulline
KMFLXGXPITMYIPSG

SEQ ID NO: 3651 - protein, 16 aa, Artificial Sequence
  source: /note="Description of Artificial Sequence: Synthetic peptide"
  MOD_RES (6)..(6): Citrulline
VWDCSXGMKLAEIKST

SEQ ID NO: 3652 - protein, 16 aa, Artificial Sequence
  source: /note="Description of Artificial Sequence: Synthetic peptide"
  MOD_RES (2)..(2): Citrulline
SXGMKLAEIKSTNDSV

SEQ ID NO: 3653 - protein, 16 aa, Artificial Sequence
  source: /note="Description of Artificial Sequence: Synthetic peptide"
  MOD_RES (10)..(10): Citrulline
VGTTKNALLXGDLAQG

SEQ ID NO: 3654 - protein, 16 aa, Artificial Sequence
  source: /note="Description of Artificial Sequence: Synthetic peptide"
  MOD_RES (6)..(6): Citrulline
KNALLXGDLAQGFSPV

SEQ ID NO: 3655 - protein, 16 aa, Artificial Sequence
  source: /note="Description of Artificial Sequence: Synthetic peptide"
  MOD_RES (2)..(2): Citrulline
  MOD_RES (14)..(14): Citrulline
GXGDGFGGNDNFGXGG

SEQ ID NO: 3656 - protein, 16 aa, Artificial Sequence
  source: /note="Description of Artificial Sequence: Synthetic peptide"
  MOD_RES (2)..(2): Citrulline
  MOD_RES (9)..(9): Citrulline
GXGGNFSGXGGFGGSC

SEQ ID NO: 3657 - protein, 16 aa, Artificial Sequence
  source: /note="Description of Artificial Sequence: Synthetic peptide"
  MOD_RES (5)..(5): Citrulline
NFSGXGGFGGSCGGGG

SEQ ID NO: 3658 - protein, 16 aa, Artificial Sequence
  source: /note="Description of Artificial Sequence: Synthetic peptide"
  MOD_RES (7)..(7): Citrulline
  MOD_RES (11)..(11): Citrulline
VVGSAGXLVAXGADLY

SEQ ID NO: 3659 - protein, 16 aa, Artificial Sequence
  source: /note="Description of Artificial Sequence: Synthetic peptide"
  MOD_RES (3)..(3): Citrulline
  MOD_RES (7)..(7): Citrulline
AGXLVAXGADLYGQKN

SEQ ID NO: 3660 - protein, 16 aa, Artificial Sequence
  source: /note="Description of Artificial Sequence: Synthetic peptide"
  MOD_RES (3)..(3): Citrulline
VAXGADLYGQKNSATQ

SEQ ID NO: 3661 - protein, 16 aa, Artificial Sequence
  source: /note="Description of Artificial Sequence: Synthetic peptide"
  MOD_RES (3)..(3): Citrulline
AAXGGLSLLSQGESEE

SEQ ID NO: 3662 - protein, 16 aa, Artificial Sequence
  source: /note="Description of Artificial Sequence: Synthetic peptide"
  MOD_RES (11)..(11): Citrulline
LPLPGPDPGPXGSQGS

SEQ ID NO: 3663 - protein, 16 aa, Artificial Sequence
  source: /note="Description of Artificial Sequence: Synthetic peptide"
  MOD_RES (7)..(7): Citrulline
GPDPGPXGSQGSPTPT

SEQ ID NO: 3664 - protein, 16 aa, Artificial Sequence
  source: /note="Description of Artificial Sequence: Synthetic peptide"
  MOD_RES (15)..(15): Citrulline
EKHYESKEYGKSFSXG

SEQ ID NO: 3665 - protein, 16 aa, Artificial Sequence
  source: /note="Description of Artificial Sequence: Synthetic peptide"
  MOD_RES (11)..(11): Citrulline
ESKEYGKSFSXGSLVT

SEQ ID NO: 3666 - protein, 16 aa, Artificial Sequence
  source: /note="Description of Artificial Sequence: Synthetic peptide"
  MOD_RES (4)..(4): Citrulline
  MOD_RES (10)..(10): Citrulline
FKIXYGKSIXGEEIEN

SEQ ID NO: 3667 - protein, 16 aa, Artificial Sequence
  source: /note="Description of Artificial Sequence: Synthetic peptide"
  MOD_RES (6)..(6): Citrulline
YGKSIXGEEIENKEVI

SEQ ID NO: 3668 - protein, 16 aa, Artificial Sequence
  source: /note="Description of Artificial Sequence: Synthetic peptide"
  MOD_RES (2)..(2): Citrulline
IXGEEIENKEVITQEL

SEQ ID NO: 3669 - protein, 16 aa, Artificial Sequence
  source: /note="Description of Artificial Sequence: Synthetic peptide"
  MOD_RES (4)..(4): Citrulline
  MOD_RES (13)..(13): Citrulline
VPIXGVPGQWQGXTSA

SEQ ID NO: 3670 - protein, 16 aa, Artificial Sequence
  source: /note="Description of Artificial Sequence: Synthetic peptide"
  MOD_RES (14)..(14): Citrulline
GPGHTLPPKPPSPXGT

SEQ ID NO: 3671 - protein, 16 aa, Artificial Sequence
  source: /note="Description of Artificial Sequence: Synthetic peptide"
  MOD_RES (10)..(10): Citrulline
TLPPKPPSPXGTTASP

SEQ ID NO: 3672 - protein, 16 aa, Artificial Sequence
  source: /note="Description of Artificial Sequence: Synthetic peptide"
  MOD_RES (9)..(9): Citrulline
  MOD_RES (13)..(13): Citrulline
ASAQSTAGXLYPXGYP

SEQ ID NO: 3673 - protein, 16 aa, Artificial Sequence
  source: /note="Description of Artificial Sequence: Synthetic peptide"
  MOD_RES (5)..(5): Citrulline
  MOD_RES (9)..(9): Citrulline
STAGXLYPXGYPVLDP

SEQ ID NO: 3674 - protein, 16 aa, Artificial Sequence
  source: /note="Description of Artificial Sequence: Synthetic peptide"
  MOD_RES (9)..(9): Citrulline
  MOD_RES (15)..(15): Citrulline
LQQYVPFAXGSGQAXG

SEQ ID NO: 3675 - protein, 16 aa, Artificial Sequence
  source: /note="Description of Artificial Sequence: Synthetic peptide"
  MOD_RES (5)..(5): Citrulline
  MOD_RES (11)..(11): Citrulline
VPFAXGSGQAXGLSPM

SEQ ID NO: 3676 - protein, 16 aa, Artificial Sequence
  source: /note="Description of Artificial Sequence: Synthetic peptide"
  MOD_RES (13)..(13): Citrulline
TSLLMSPEKFKLXGEQ

SEQ ID NO: 3677 - protein, 16 aa, Artificial Sequence
  source: /note="Description of Artificial Sequence: Synthetic peptide"
  MOD_RES (9)..(9): Citrulline
MSPEKFKLXGEQIICC

SEQ ID NO: 3678 - protein, 16 aa, Artificial Sequence
  source: /note="Description of Artificial Sequence: Synthetic peptide"
  MOD_RES (5)..(5): Citrulline
KFKLXGEQIICCVCGD

SEQ ID NO: 3679 - protein, 16 aa, Artificial Sequence
  source: /note="Description of Artificial Sequence: Synthetic peptide"
  MOD_RES (7)..(7): Citrulline
  MOD_RES (12)..(12): Citrulline
SVAFASXLGGIXGAAP

SEQ ID NO: 3680 - protein, 16 aa, Artificial Sequence
  source: /note="Description of Artificial Sequence: Synthetic peptide"
  MOD_RES (3)..(3): Citrulline
  MOD_RES (8)..(8): Citrulline
ASXLGGIXGAAPGLLM

SEQ ID NO: 3681 - protein, 16 aa, Artificial Sequence
  source: /note="Description of Artificial Sequence: Synthetic peptide"
  MOD_RES (2)..(2): Citrulline
  MOD_RES (6)..(6): Citrulline
FXNLYXGILPPLMQKT

SEQ ID NO: 3682 - protein, 16 aa, Artificial Sequence
  source: /note="Description of Artificial Sequence: Synthetic peptide"
  MOD_RES (6)..(6): Citrulline
  MOD_RES (8)..(8): Citrulline
PSILPXHXGASAINWT

SEQ ID NO: 3683 - protein, 16 aa, Artificial Sequence
  source: /note="Description of Artificial Sequence: Synthetic peptide"
  MOD_RES (2)..(2): Citrulline
  MOD_RES (4)..(4): Citrulline
PXHXGASAINWTLIMG

SEQ ID NO: 3684 - protein, 16 aa, Artificial Sequence
  source: /note="Description of Artificial Sequence: Synthetic peptide"
  MOD_RES (9)..(9): Citrulline
  MOD_RES (11)..(11): Citrulline
KSGGYGFGXGXASGFA

SEQ ID NO: 3685 - protein, 16 aa, Artificial Sequence
  source: /note="Description of Artificial Sequence: Synthetic peptide"
  MOD_RES (5)..(5): Citrulline
  MOD_RES (7)..(7): Citrulline
YGFGXGXASGFAGSMF

SEQ ID NO: 3686 - protein, 16 aa, Artificial Sequence
  source: /note="Description of Artificial Sequence: Synthetic peptide"
  MOD_RES (4)..(4): Citrulline
  MOD_RES (6)..(6): Citrulline
GEGXSXGSANDYKDTL

SEQ ID NO: 3687 - protein, 16 aa, Artificial Sequence
  source: /note="Description of Artificial Sequence: Synthetic peptide"
  MOD_RES (2)..(2): Citrulline
SXGSANDYKDTLGKGS

SEQ ID NO: 3688 - protein, 16 aa, Artificial Sequence
  source: /note="Description of Artificial Sequence: Synthetic peptide"
  MOD_RES (10)..(10): Citrulline
QSNLGVPPGXGSCPLT

SEQ ID NO: 3689 - protein, 16 aa, Artificial Sequence
  source: /note="Description of Artificial Sequence: Synthetic peptide"
  MOD_RES (9)..(9): Citrulline
  MOD_RES (12)..(12): Citrulline
QYNMKIVIXGDXNTGK

SEQ ID NO: 3690 - protein, 16 aa, Artificial Sequence
  source: /note="Description of Artificial Sequence: Synthetic peptide"
  MOD_RES (5)..(5): Citrulline
  MOD_RES (8)..(8): Citrulline
KIVIXGDXNTGKTALW

SEQ ID NO: 3691 - protein, 16 aa, Artificial Sequence
  source: /note="Description of Artificial Sequence: Synthetic peptide"
  MOD_RES (4)..(4): Citrulline
DQPXGSPPLPAGPVPS

SEQ ID NO: 3692 - protein, 16 aa, Artificial Sequence
  source: /note="Description of Artificial Sequence: Synthetic peptide"
  MOD_RES (10)..(10): Citrulline
DFNKQVTLGXGGQILT

SEQ ID NO: 3693 - protein, 16 aa, Artificial Sequence
  source: /note="Description of Artificial Sequence: Synthetic peptide"
  MOD_RES (6)..(6): Citrulline
QVTLGXGGQILTSPNQ

SEQ ID NO: 3694 - protein, 16 aa, Artificial Sequence
  source: /note="Description of Artificial Sequence: Synthetic peptide"
  MOD_RES (2)..(2): Citrulline
GXGGQILTSPNQGFNL

SEQ ID NO: 3695 - protein, 16 aa, Artificial Sequence
  source: /note="Description of Artificial Sequence: Synthetic peptide"
  MOD_RES (11)..(11): Citrulline
APDQAAEIGSXGSTKA

SEQ ID NO: 3696 - protein, 16 aa, Artificial Sequence
  source: /note="Description of Artificial Sequence: Synthetic peptide"
  MOD_RES (7)..(7): Citrulline
AAEIGSXGSTKAQGPQ

SEQ ID NO: 3697 - protein, 16 aa, Artificial Sequence
  source: /note="Description of Artificial Sequence: Synthetic peptide"
  MOD_RES (3)..(3): Citrulline
GSXGSTKAQGPQQQPG

SEQ ID NO: 3698 - protein, 16 aa, Artificial Sequence
  source: /note="Description of Artificial Sequence: Synthetic peptide"
  MOD_RES (7)..(7): Citrulline
LDLVLSXGPLSKSLLE

SEQ ID NO: 3699 - protein, 16 aa, Artificial Sequence
  source: /note="Description of Artificial Sequence: Synthetic peptide"
  MOD_RES (3)..(3): Citrulline
LSXGPLSKSLLEKAGP

SEQ ID NO: 3700 - protein, 16 aa, Artificial Sequence
  source: /note="Description of Artificial Sequence: Synthetic peptide"
  MOD_RES (8)..(8): Citrulline
SQVMGSGXGSLSSGGQ

SEQ ID NO: 3701 - protein, 16 aa, Artificial Sequence
  source: /note="Description of Artificial Sequence: Synthetic peptide"
  MOD_RES (4)..(4): Citrulline
GSGXGSLSSGGQTSWD

SEQ ID NO: 3702 - protein, 16 aa, Artificial Sequence
  source: /note="Description of Artificial Sequence: Synthetic peptide"
  MOD_RES (10)..(10): Citrulline
CKDCGKAFCXGSQLTQ

SEQ ID NO: 3703 - protein, 16 aa, Artificial Sequence
  source: /note="Description of Artificial Sequence: Synthetic peptide"
  MOD_RES (6)..(6): Citrulline
  MOD_RES (15)..(15): Citrulline
GKAFCXGSQLTQHQXI

SEQ ID NO: 3704 - protein, 16 aa, Artificial Sequence
  source: /note="Description of Artificial Sequence: Synthetic peptide"
  MOD_RES (11)..(11): Citrulline
  MOD_RES (13)..(13): Citrulline
DGGLDGVGAPXGXLQS

SEQ ID NO: 3705 - protein, 16 aa, Artificial Sequence
  source: /note="Description of Artificial Sequence: Synthetic peptide"
  MOD_RES (7)..(7): Citrulline
  MOD_RES (9)..(9): Citrulline
DGVGAPXGXLQSSPSL

SEQ ID NO: 3706 - protein, 16 aa, Artificial Sequence
  source: /note="Description of Artificial Sequence: Synthetic peptide"
  MOD_RES (10)..(10): Citrulline
  MOD_RES (16)..(16): Citrulline
MHLGAVPVYXGSPSVX

SEQ ID NO: 3707 - protein, 16 aa, Artificial Sequence
  source: /note="Description of Artificial Sequence: Synthetic peptide"
  MOD_RES (6)..(6): Citrulline
  MOD_RES (12)..(12): Citrulline
AVPVYXGSPSVXDWMP

SEQ ID NO: 3708 - protein, 16 aa, Artificial Sequence
  source: /note="Description of Artificial Sequence: Synthetic peptide"
  MOD_RES (12)..(12): Citrulline
  MOD_RES (15)..(15): Citrulline
MSPSMLTGNSPXGCXL

SEQ ID NO: 3709 - protein, 16 aa, Artificial Sequence
  source: /note="Description of Artificial Sequence: Synthetic peptide"
  MOD_RES (8)..(8): Citrulline
  MOD_RES (11)..(11): Citrulline
MLTGNSPXGCXLPSIS

SEQ ID NO: 3710 - protein, 16 aa, Artificial Sequence
  source: /note="Description of Artificial Sequence: Synthetic peptide"
  MOD_RES (8)..(8): Citrulline
ILKELAAXGKDLLLSE

SEQ ID NO: 3711 - protein, 16 aa, Artificial Sequence
  source: /note="Description of Artificial Sequence: Synthetic peptide"
  MOD_RES (4)..(4): Citrulline
LAAXGKDLLLSEAQGP

SEQ ID NO: 3712 - protein, 16 aa, Artificial Sequence
  source: /note="Description of Artificial Sequence: Synthetic peptide"
  MOD_RES (7)..(7): Citrulline
  MOD_RES (13)..(13): Citrulline
FLGSETXNMEFKXGSG

SEQ ID NO: 3713 - protein, 16 aa, Artificial Sequence
  source: /note="Description of Artificial Sequence: Synthetic peptide"
  MOD_RES (3)..(3): Citrulline
  MOD_RES (9)..(9): Citrulline
ETXNMEFKXGSGEYLS

SEQ ID NO: 3714 - protein, 16 aa, Artificial Sequence
  source: /note="Description of Artificial Sequence: Synthetic peptide"
  MOD_RES (2)..(2): Citrulline
  MOD_RES (10)..(10): Citrulline
KXVSSGSSEXGSKSPL

SEQ ID NO: 3715 - protein, 16 aa, Artificial Sequence
  source: /note="Description of Artificial Sequence: Synthetic peptide"
  MOD_RES (6)..(6): Citrulline
  MOD_RES (14)..(14): Citrulline
SGSSEXGSKSPLKXAQ

SEQ ID NO: 3716 - protein, 16 aa, Artificial Sequence
  source: /note="Description of Artificial Sequence: Synthetic peptide"
  MOD_RES (2)..(2): Citrulline
  MOD_RES (10)..(10): Citrulline
EXGSKSPLKXAQEQSP

SEQ ID NO: 3717 - protein, 16 aa, Artificial Sequence
  source: /note="Description of Artificial Sequence: Synthetic peptide"
  MOD_RES (6)..(6): Citrulline
  MOD_RES (9)..(9): Citrulline
QVIVSXGGXFLEAPVS

SEQ ID NO: 3718 - protein, 16 aa, Artificial Sequence
  source: /note="Description of Artificial Sequence: Synthetic peptide"
  MOD_RES (4)..(4): Citrulline
  MOD_RES (7)..(7): Citrulline
SFTXPGXGSWLGKGGP

SEQ ID NO: 3719 - protein, 16 aa, Artificial Sequence
  source: /note="Description of Artificial Sequence: Synthetic peptide"
  MOD_RES (3)..(3): Citrulline
PGXGSWLGKGGPDTGQ

SEQ ID NO: 3720 - protein, 16 aa, Artificial Sequence
  source: /note="Description of Artificial Sequence: Synthetic peptide"
  MOD_RES (8)..(8): Citrulline
DNKLLLSXGKTYMCKE

SEQ ID NO: 3721 - protein, 16 aa, Artificial Sequence
  source: /note="Description of Artificial Sequence: Synthetic peptide"
  MOD_RES (4)..(4): Citrulline
LLSXGKTYMCKEPGWF

SEQ ID NO: 3722 - protein, 16 aa, Artificial Sequence
  source: /note="Description of Artificial Sequence: Synthetic peptide"
  MOD_RES (11)..(11): Citrulline
YILFFHITSTXGDKYL

SEQ ID NO: 3723 - protein, 16 aa, Artificial Sequence
  source: /note="Description of Artificial Sequence: Synthetic peptide"
  MOD_RES (7)..(7): Citrulline
FHITSTXGDKYLYEPV

SEQ ID NO: 3724 - protein, 16 aa, Artificial Sequence
  source: /note="Description of Artificial Sequence: Synthetic peptide"
  MOD_RES (3)..(3): Citrulline
STXGDKYLYEPVYPKG

SEQ ID NO: 3725 - protein, 16 aa, Artificial Sequence
  source: /note="Description of Artificial Sequence: Synthetic peptide"
  MOD_RES (5)..(5): Citrulline
  MOD_RES (13)..(13): Citrulline
GENSXPKSGLIVXGMM

SEQ ID NO: 3726 - protein, 16 aa, Artificial Sequence
  source: /note="Description of Artificial Sequence: Synthetic peptide"
  MOD_RES (1)..(1): Citrulline
  MOD_RES (9)..(9): Citrulline
XPKSGLIVXGMMSGPI

SEQ ID NO: 3727 - protein, 16 aa, Artificial Sequence
  source: /note="Description of Artificial Sequence: Synthetic peptide"
  MOD_RES (5)..(5): Citrulline
GLIVXGMMSGPIASSP

SEQ ID NO: 3728 - protein, 16 aa, Artificial Sequence
  source: /note="Description of Artificial Sequence: Synthetic peptide"
  MOD_RES (10)..(10): Citrulline
  MOD_RES (13)..(13): Citrulline
EKFIVPIKAXGAXAIL

SEQ ID NO: 3729 - protein, 16 aa, Artificial Sequence
  source: /note="Description of Artificial Sequence: Synthetic peptide"
  MOD_RES (6)..(6): Citrulline
  MOD_RES (9)..(9): Citrulline
VPIKAXGAXAILDFPD

SEQ ID NO: 3730 - protein, 16 aa, Artificial Sequence
  source: /note="Description of Artificial Sequence: Synthetic peptide"
  MOD_RES (11)..(11): Citrulline
KVTIPTMTLSXGKVDF

SEQ ID NO: 3731 - protein, 16 aa, Artificial Sequence
  source: /note="Description of Artificial Sequence: Synthetic peptide"
  MOD_RES (7)..(7): Citrulline
PTMTLSXGKVDFATIQ

SEQ ID NO: 3732 - protein, 16 aa, Artificial Sequence
  source: /note="Description of Artificial Sequence: Synthetic peptide"
  MOD_RES (7)..(7): Citrulline
  MOD_RES (12)..(12): Citrulline
TSNSTKXTSLSXGISV

SEQ ID NO: 3733 - protein, 16 aa, Artificial Sequence
  source: /note="Description of Artificial Sequence: Synthetic peptide"
  MOD_RES (2)..(2): Citrulline
  MOD_RES (15)..(15): Citrulline
CXGAQQAYDAPAPSXG

SEQ ID NO: 3734 - protein, 16 aa, Artificial Sequence
  source: /note="Description of Artificial Sequence: Synthetic peptide"
  MOD_RES (11)..(11): Citrulline
QQAYDAPAPSXGSVQV

SEQ ID NO: 3735 - protein, 16 aa, Artificial Sequence
  source: /note="Description of Artificial Sequence: Synthetic peptide"
  MOD_RES (7)..(7): Citrulline
  MOD_RES (16)..(16): Citrulline
DAPAPSXGSVQVALSX

SEQ ID NO: 3736 - protein, 16 aa, Artificial Sequence
  source: /note="Description of Artificial Sequence: Synthetic peptide"
  MOD_RES (10)..(10): Citrulline
KACAKYKLDXGDPILD

SEQ ID NO: 3737 - protein, 16 aa, Artificial Sequence
  source: /note="Description of Artificial Sequence: Synthetic peptide"
  MOD_RES (6)..(6): Citrulline
KYKLDXGDPILDEEFQ

SEQ ID NO: 3738 - protein, 16 aa, Artificial Sequence
  source: /note="Description of Artificial Sequence: Synthetic peptide"
  MOD_RES (7)..(7): Citrulline
PTSPSYXGQHILANSN

SEQ ID NO: 3739 - protein, 16 aa, Artificial Sequence
  source: /note="Description of Artificial Sequence: Synthetic peptide"
  MOD_RES (3)..(3): Citrulline
SYXGQHILANSNNSNP

SEQ ID NO: 3740 - protein, 16 aa, Artificial Sequence
  source: /note="Description of Artificial Sequence: Synthetic peptide"
  MOD_RES (6)..(6): Citrulline
  MOD_RES (10)..(10): Citrulline
LAGGGXGAVXGAGVAG

SEQ ID NO: 3741 - protein, 16 aa, Artificial Sequence
  source: /note="Description of Artificial Sequence: Synthetic peptide"
  MOD_RES (2)..(2): Citrulline
  MOD_RES (6)..(6): Citrulline
GXGAVXGAGVAGPAAH

SEQ ID NO: 3742 - protein, 16 aa, Artificial Sequence
  source: /note="Description of Artificial Sequence: Synthetic peptide"
  MOD_RES (13)..(13): Citrulline
  MOD_RES (15)..(15): Citrulline
DTVVFKDGQYWIXGXT

SEQ ID NO: 3743 - protein, 16 aa, Artificial Sequence
  source: /note="Description of Artificial Sequence: Synthetic peptide"
  MOD_RES (9)..(9): Citrulline
  MOD_RES (11)..(11): Citrulline
FKDGQYWIXGXTSVDI

SEQ ID NO: 3744 - protein, 16 aa, Artificial Sequence
  source: /note="Description of Artificial Sequence: Synthetic peptide"
  MOD_RES (5)..(5): Citrulline
  MOD_RES (7)..(7): Citrulline
QYWIXGXTSVDIIKTG

SEQ ID NO: 3745 - protein, 16 aa, Artificial Sequence
  source: /note="Description of Artificial Sequence: Synthetic peptide"
  MOD_RES (10)..(10): Citrulline
  MOD_RES (13)..(13): Citrulline
APAAPSPPPXGSXAGP

SEQ ID NO: 3746 - protein, 16 aa, Artificial Sequence
  source: /note="Description of Artificial Sequence: Synthetic peptide"
  MOD_RES (6)..(6): Citrulline
  MOD_RES (9)..(9): Citrulline
PSPPPXGSXAGPVVVV

SEQ ID NO: 3747 - protein, 16 aa, Artificial Sequence
  source: /note="Description of Artificial Sequence: Synthetic peptide"
  MOD_RES (8)..(8): Citrulline
  MOD_RES (11)..(11): Citrulline
SLPGLKSXGSXAAGGA

SEQ ID NO: 3748 - protein, 16 aa, Artificial Sequence
  source: /note="Description of Artificial Sequence: Synthetic peptide"
  MOD_RES (4)..(4): Citrulline
  MOD_RES (7)..(7): Citrulline
LKSXGSXAAGGAPSPP

SEQ ID NO: 3749 - protein, 16 aa, Artificial Sequence
  source: /note="Description of Artificial Sequence: Synthetic peptide"
  MOD_RES (8)..(8): Citrulline
  MOD_RES (10)..(10): Citrulline
CTGEEQWXGXPWKTEP

SEQ ID NO: 3750 - protein, 14 aa, Artificial Sequence
  source: /note="Description of Artificial Sequence: Synthetic peptide"
  MOD_RES (4)..(4): Citrulline
  MOD_RES (6)..(6): Citrulline
EQWXGXPWKTEPPG

SEQ ID NO: 3751 - protein, 16 aa, Artificial Sequence
  source: /note="Description of Artificial Sequence: Synthetic peptide"
  MOD_RES (8)..(8): Citrulline
PGSPNTSXGWLPKSPT

SEQ ID NO: 3752 - protein, 16 aa, Artificial Sequence
  source: /note="Description of Artificial Sequence: Synthetic peptide"
  MOD_RES (4)..(4): Citrulline
NTSXGWLPKSPTKGED

SEQ ID NO: 3753 - protein, 16 aa, Artificial Sequence
  source: /note="Description of Artificial Sequence: Synthetic peptide"
  MOD_RES (10)..(10): Citrulline
CPENTSTVKXGAVNIS

SEQ ID NO: 3754 - protein, 16 aa, Artificial Sequence
  source: /note="Description of Artificial Sequence: Synthetic peptide"
  MOD_RES (6)..(6): Citrulline
TSTVKXGAVNISACGV

SEQ ID NO: 3755 - protein, 16 aa, Artificial Sequence
  source: /note="Description of Artificial Sequence: Synthetic peptide"
  MOD_RES (6)..(6): Citrulline
VTNIQXGFIESGKKDF

SEQ ID NO: 3756 - protein, 16 aa, Artificial Sequence
  source: /note="Description of Artificial Sequence: Synthetic peptide"
  MOD_RES (9)..(9): Citrulline
SDPYTASSXGMLPTAL

SEQ ID NO: 3757 - protein, 16 aa, Artificial Sequence
  source: /note="Description of Artificial Sequence: Synthetic peptide"
  MOD_RES (5)..(5): Citrulline
TASSXGMLPTALQNQD

SEQ ID NO: 3758 - protein, 16 aa, Artificial Sequence
  source: /note="Description of Artificial Sequence: Synthetic peptide"
  MOD_RES (10)..(10): Citrulline
FLQFCDSGGXGSFPGL

SEQ ID NO: 3759 - protein, 16 aa, Artificial Sequence
  source: /note="Description of Artificial Sequence: Synthetic peptide"
  MOD_RES (6)..(6): Citrulline
CDSGGXGSFPGLAVEP

SEQ ID NO: 3760 - protein, 16 aa, Artificial Sequence
  source: /note="Description of Artificial Sequence: Synthetic peptide"
  MOD_RES (2)..(2): Citrulline
GXGSFPGLAVEPGSNL

SEQ ID NO: 3761 - protein, 16 aa, Artificial Sequence
  source: /note="Description of Artificial Sequence: Synthetic peptide"
  MOD_RES (1)..(1): Citrulline
  MOD_RES (13)..(13): Citrulline
XALDAAKPLPIYXGKD

SEQ ID NO: 3762 - protein, 16 aa, Artificial Sequence
  source: /note="Description of Artificial Sequence: Synthetic peptide"
  MOD_RES (9)..(9): Citrulline
AAKPLPIYXGKDMPDL

SEQ ID NO: 3763 - protein, 16 aa, Artificial Sequence
  source: /note="Description of Artificial Sequence: Synthetic peptide"
  MOD_RES (11)..(11): Citrulline
  MOD_RES (16)..(16): Citrulline
LPLANQSFLLXGQVIX

SEQ ID NO: 3764 - protein, 16 aa, Artificial Sequence
  source: /note="Description of Artificial Sequence: Synthetic peptide"
  MOD_RES (9)..(9): Citrulline
FGVPGGTLXGWLKDEP

SEQ ID NO: 3765 - protein, 16 aa, Artificial Sequence
  source: /note="Description of Artificial Sequence: Synthetic peptide"
  MOD_RES (5)..(5): Citrulline
  MOD_RES (15)..(15): Citrulline
GGTLXGWLKDEPKLXW

SEQ ID NO: 3766 - protein, 16 aa, Artificial Sequence
  source: /note="Description of Artificial Sequence: Synthetic peptide"
  MOD_RES (8)..(9): Citrulline
PPSILPSXXGGILDGE

SEQ ID NO: 3767 - protein, 16 aa, Artificial Sequence
  source: /note="Description of Artificial Sequence: Synthetic peptide"
  MOD_RES (4)..(5): Citrulline
LPSXXGGILDGEMDPK

SEQ ID NO: 3768 - protein, 16 aa, Artificial Sequence
  source: /note="Description of Artificial Sequence: Synthetic peptide"
  MOD_RES (10)..(10): Citrulline
KVDLAAFQTXGNQLCS

SEQ ID NO: 3769 - protein, 16 aa, Artificial Sequence
  source: /note="Description of Artificial Sequence: Synthetic peptide"
  MOD_RES (6)..(6): Citrulline
AAFQTXGNQLCSLISG

SEQ ID NO: 3770 - protein, 16 aa, Artificial Sequence
  source: /note="Description of Artificial Sequence: Synthetic peptide"
  MOD_RES (9)..(9): Citrulline
  MOD_RES (12)..(12): Citrulline
NQWKNGATXDSXGKML

SEQ ID NO: 3771 - protein, 16 aa, Artificial Sequence
  source: /note="Description of Artificial Sequence: Synthetic peptide"
  MOD_RES (5)..(5): Citrulline
  MOD_RES (8)..(8): Citrulline
NGATXDSXGKMLSPAT

SEQ ID NO: 3772 - protein, 16 aa, Artificial Sequence
  source: /note="Description of Artificial Sequence: Synthetic peptide"
  MOD_RES (7)..(7): Citrulline
  MOD_RES (16)..(16): Citrulline
FLKESLXGEALGVYNX

SEQ ID NO: 3773 - protein, 16 aa, Artificial Sequence
  source: /note="Description of Artificial Sequence: Synthetic peptide"
  MOD_RES (6)..(6): Citrulline
TEQGAXGSMPAYSGNN

SEQ ID NO: 3774 - protein, 16 aa, Artificial Sequence
  source: /note="Description of Artificial Sequence: Synthetic peptide"
  MOD_RES (2)..(2): Citrulline
AXGSMPAYSGNNMDKS

SEQ ID NO: 3775 - protein, 16 aa, Artificial Sequence
  source: /note="Description of Artificial Sequence: Synthetic peptide"
  MOD_RES (3)..(3): Citrulline
  MOD_RES (10)..(10): Citrulline
YAXEGPCPPXGSPACP

SEQ ID NO: 3776 - protein, 16 aa, Artificial Sequence
  source: /note="Description of Artificial Sequence: Synthetic peptide"
  MOD_RES (6)..(6): Citrulline
  MOD_RES (16)..(16): Citrulline
GPCPPXGSPACPSLLX

SEQ ID NO: 3777 - protein, 16 aa, Artificial Sequence
  source: /note="Description of Artificial Sequence: Synthetic peptide"
  MOD_RES (9)..(9): Citrulline
  MOD_RES (12)..(12): Citrulline
PSPSNVTEXKKXGSSW

SEQ ID NO: 3778 - protein, 16 aa, Artificial Sequence
  source: /note="Description of Artificial Sequence: Synthetic peptide"
  MOD_RES (5)..(5): Citrulline
  MOD_RES (8)..(8): Citrulline
NVTEXKKXGSSWESNN

SEQ ID NO: 3779 - protein, 16 aa, Artificial Sequence
  source: /note="Description of Artificial Sequence: Synthetic peptide"
  MOD_RES (1)..(1): Citrulline
  MOD_RES (4)..(4): Citrulline
XKKXGSSWESNNLSAD

SEQ ID NO: 3780 - protein, 16 aa, Artificial Sequence
  source: /note="Description of Artificial Sequence: Synthetic peptide"
  MOD_RES (11)..(11): Citrulline
QCSGVLQLGGXGAQGL

SEQ ID NO: 3781 - protein, 16 aa, Artificial Sequence
  source: /note="Description of Artificial Sequence: Synthetic peptide"
  MOD_RES (7)..(7): Citrulline
VLQLGGXGAQGLWGQG

SEQ ID NO: 3782 - protein, 16 aa, Artificial Sequence
  source: /note="Description of Artificial Sequence: Synthetic peptide"
  MOD_RES (13)..(13): Citrulline
  MOD_RES (16)..(16): Citrulline
AAAGLTCLPSVTXGQX

SEQ ID NO: 3783 - protein, 16 aa, Artificial Sequence
  source: /note="Description of Artificial Sequence: Synthetic peptide"
  MOD_RES (9)..(9): Citrulline
  MOD_RES (12)..(12): Citrulline
LTCLPSVTXGQXLAAG

SEQ ID NO: 3784 - protein, 16 aa, Artificial Sequence
  source: /note="Description of Artificial Sequence: Synthetic peptide"
  MOD_RES (5)..(5): Citrulline
  MOD_RES (8)..(8): Citrulline
PSVTXGQXLAAGGGCL

SEQ ID NO: 3785 - protein, 16 aa, Artificial Sequence
  source: /note="Description of Artificial Sequence: Synthetic peptide"
  MOD_RES (10)..(10): Citrulline
  MOD_RES (14)..(14): Citrulline
VWLVEKIFGXGGEXIP

SEQ ID NO: 3786 - protein, 16 aa, Artificial Sequence
  source: /note="Description of Artificial Sequence: Synthetic peptide"
  MOD_RES (6)..(6): Citrulline
  MOD_RES (10)..(10): Citrulline
EKIFGXGGEXIPHVQG

SEQ ID NO: 3787 - protein, 16 aa, Artificial Sequence
  source: /note="Description of Artificial Sequence: Synthetic peptide"
  MOD_RES (1)..(1): Citrulline
  MOD_RES (10)..(10): Citrulline
XSSSVPSVVXGAYLSV

SEQ ID NO: 3788 - protein, 16 aa, Artificial Sequence
  source: /note="Description of Artificial Sequence: Synthetic peptide"
  MOD_RES (6)..(6): Citrulline
VPSVVXGAYLSVLEPP

SEQ ID NO: 3789 - protein, 16 aa, Artificial Sequence
  source: /note="Description of Artificial Sequence: Synthetic peptide"
  MOD_RES (6)..(6): Citrulline
  MOD_RES (11)..(11): Citrulline
LYEGLXGFTLXGINNP

SEQ ID NO: 3790 - protein, 16 aa, Artificial Sequence
  source: /note="Description of Artificial Sequence: Synthetic peptide"
  MOD_RES (2)..(2): Citrulline
  MOD_RES (7)..(7): Citrulline
LXGFTLXGINNPGATW

SEQ ID NO: 3791 - protein, 16 aa, Artificial Sequence
  source: /note="Description of Artificial Sequence: Synthetic peptide"
  MOD_RES (3)..(3): Citrulline
  MOD_RES (11)..(11): Citrulline
GTXATGNYAGXGTTGM

SEQ ID NO: 3792 - protein, 16 aa, Artificial Sequence
  source: /note="Description of Artificial Sequence: Synthetic peptide"
  MOD_RES (7)..(7): Citrulline
  MOD_RES (15)..(15): Citrulline
TGNYAGXGTTGMVAXF

SEQ ID NO: 3793 - protein, 16 aa, Artificial Sequence
  source: /note="Description of Artificial Sequence: Synthetic peptide"
  MOD_RES (9)..(9): Citrulline
  MOD_RES (11)..(11): Citrulline
MKPAPVGSXGXGTPAY

SEQ ID NO: 3794 - protein, 16 aa, Artificial Sequence
  source: /note="Description of Artificial Sequence: Synthetic peptide"
  MOD_RES (5)..(5): Citrulline
  MOD_RES (7)..(7): Citrulline
PVGSXGXGTPAYPEST

SEQ ID NO: 3795 - protein, 16 aa, Artificial Sequence
  source: /note="Description of Artificial Sequence: Synthetic peptide"
  MOD_RES (10)..(10): Citrulline
HKEIVTNIQXGFIESG

SEQ ID NO: 3796 - protein, 16 aa, Artificial Sequence
  source: /note="Description of Artificial Sequence: Synthetic peptide"
  MOD_RES (6)..(6): Citrulline
VTNIQXGFIESGKKDL

SEQ ID NO: 3797 - protein, 16 aa, Artificial Sequence
  source: /note="Description of Artificial Sequence: Synthetic peptide"
  MOD_RES (12)..(12): Citrulline
GEDIGKNTFKYXGQDG

SEQ ID NO: 3798 - protein, 16 aa, Artificial Sequence
  source: /note="Description of Artificial Sequence: Synthetic peptide"
  MOD_RES (8)..(8): Citrulline
GKNTFKYXGQDGTHAS

SEQ ID NO: 3799 - protein, 16 aa, Artificial Sequence
  source: /note="Description of Artificial Sequence: Synthetic peptide"
  MOD_RES (10)..(10): Citrulline
SQMSELWGVXGGGPGE

SEQ ID NO: 3800 - protein, 16 aa, Artificial Sequence
  source: /note="Description of Artificial Sequence: Synthetic peptide"
  MOD_RES (6)..(6): Citrulline
ELWGVXGGGPGEPGPP

SEQ ID NO: 3801 - protein, 16 aa, Artificial Sequence
  source: /note="Description of Artificial Sequence: Synthetic peptide"
  MOD_RES (12)..(12): Citrulline
GEEHGYSSGHSXGTVK

SEQ ID NO: 3802 - protein, 16 aa, Artificial Sequence
  source: /note="Description of Artificial Sequence: Synthetic peptide"
  MOD_RES (8)..(8): Citrulline
  MOD_RES (14)..(14): Citrulline
GYSSGHSXGTVKCXHG

SEQ ID NO: 3803 - protein, 16 aa, Artificial Sequence
  source: /note="Description of Artificial Sequence: Synthetic peptide"
  MOD_RES (9)..(9): Citrulline
  MOD_RES (14)..(14): Citrulline
PCSQSYSQXGYGAXEN

SEQ ID NO: 3804 - protein, 16 aa, Artificial Sequence
  source: /note="Description of Artificial Sequence: Synthetic peptide"
  MOD_RES (5)..(5): Citrulline
  MOD_RES (10)..(10): Citrulline
SYSQXGYGAXENGQPQ

SEQ ID NO: 3805 - protein, 16 aa, Artificial Sequence
  source: /note="Description of Artificial Sequence: Synthetic peptide"
  MOD_RES (1)..(1): Citrulline
  MOD_RES (13)..(13): Citrulline
XHAHYHHGKSTQXGSS

SEQ ID NO: 3806 - protein, 16 aa, Artificial Sequence
  source: /note="Description of Artificial Sequence: Synthetic peptide"
  MOD_RES (9)..(9): Citrulline
  MOD_RES (16)..(16): Citrulline
YHHGKSTQXGSSTTGX

SEQ ID NO: 3807 - protein, 16 aa, Artificial Sequence
  source: /note="Description of Artificial Sequence: Synthetic peptide"
  MOD_RES (13)..(13): Citrulline
AAASGSSLDSFSXGSL

SEQ ID NO: 3808 - protein, 16 aa, Artificial Sequence
  source: /note="Description of Artificial Sequence: Synthetic peptide"
  MOD_RES (9)..(9): Citrulline
GSSLDSFSXGSLKISW

SEQ ID NO: 3809 - protein, 16 aa, Artificial Sequence
  source: /note="Description of Artificial Sequence: Synthetic peptide"
  MOD_RES (5)..(5): Citrulline
  MOD_RES (16)..(16): Citrulline
DSFSXGSLKISWNPWX

SEQ ID NO: 3810 - protein, 16 aa, Artificial Sequence
  source: /note="Description of Artificial Sequence: Synthetic peptide"
  MOD_RES (8)..(8): Citrulline
EQAGKSKXGSILQLCE

SEQ ID NO: 3811 - protein, 16 aa, Artificial Sequence
  source: /note="Description of Artificial Sequence: Synthetic peptide"
  MOD_RES (4)..(4): Citrulline
KSKXGSILQLCEEIAG

SEQ ID NO: 3812 - protein, 16 aa, Artificial Sequence
  source: /note="Description of Artificial Sequence: Synthetic peptide"
  MOD_RES (12)..(12): Citrulline
LTFPTSGDEYSXGFLQ

SEQ ID NO: 3813 - protein, 16 aa, Artificial Sequence
  source: /note="Description of Artificial Sequence: Synthetic peptide"
  MOD_RES (8)..(8): Citrulline
TSGDEYSXGFLQNLNL

SEQ ID NO: 3814 - protein, 16 aa, Artificial Sequence
  source: /note="Description of Artificial Sequence: Synthetic peptide"
  MOD_RES (4)..(4): Citrulline
EYSXGFLQNLNLIQDQ

SEQ ID NO: 3815 - protein, 16 aa, Artificial Sequence
  source: /note="Description of Artificial Sequence: Synthetic peptide"
  MOD_RES (14)..(14): Citrulline
GGQPTAGGSNWPLXGS

SEQ ID NO: 3816 - protein, 16 aa, Artificial Sequence
  source: /note="Description of Artificial Sequence: Synthetic peptide"
  MOD_RES (10)..(10): Citrulline
TAGGSNWPLXGSKGTY

SEQ ID NO: 3817 - protein, 16 aa, Artificial Sequence
  source: /note="Description of Artificial Sequence: Synthetic peptide"
  MOD_RES (6)..(6): Citrulline
SNWPLXGSKGTYWEGG

SEQ ID NO: 3818 - protein, 16 aa, Artificial Sequence
  source: /note="Description of Artificial Sequence: Synthetic peptide"
  MOD_RES (12)..(12): Citrulline
  MOD_RES (14)..(14): Citrulline
QTFSGGSNWPLXGXKG

SEQ ID NO: 3819 - protein, 16 aa, Artificial Sequence
  source: /note="Description of Artificial Sequence: Synthetic peptide"
  MOD_RES (8)..(8): Citrulline
  MOD_RES (10)..(10): Citrulline
GGSNWPLXGXKGTYWE

SEQ ID NO: 3820 - protein, 16 aa, Artificial Sequence
  source: /note="Description of Artificial Sequence: Synthetic peptide"
  MOD_RES (8)..(8): Citrulline
  MOD_RES (14)..(14): Citrulline
EGAAGGAXGSAGGXGE

SEQ ID NO: 3821 - protein, 16 aa, Artificial Sequence
  source: /note="Description of Artificial Sequence: Synthetic peptide"
  MOD_RES (4)..(4): Citrulline
  MOD_RES (10)..(10): Citrulline
GGAXGSAGGXGEAAAA

SEQ ID NO: 3822 - protein, 16 aa, Artificial Sequence
  source: /note="Description of Artificial Sequence: Synthetic peptide"
  MOD_RES (11)..(11): Citrulline
  MOD_RES (13)..(13): Citrulline
HGSPSTSEVLXGXEKW

SEQ ID NO: 3823 - protein, 16 aa, Artificial Sequence
  source: /note="Description of Artificial Sequence: Synthetic peptide"
  MOD_RES (7)..(7): Citrulline
  MOD_RES (9)..(9): Citrulline
STSEVLXGXEKWMVLA

SEQ ID NO: 3824 - protein, 16 aa, Artificial Sequence
  source: /note="Description of Artificial Sequence: Synthetic peptide"
  MOD_RES (11)..(11): Citrulline
  MOD_RES (16)..(16): Citrulline
LPSSMQLAVIXGDTLX

SEQ ID NO: 3825 - protein, 16 aa, Artificial Sequence
  source: /note="Description of Artificial Sequence: Synthetic peptide"
  MOD_RES (7)..(7): Citrulline
  MOD_RES (12)..(12): Citrulline
MQLAVIXGDTLXGFDS

SEQ ID NO: 3826 - protein, 16 aa, Artificial Sequence
  source: /note="Description of Artificial Sequence: Synthetic peptide"
  MOD_RES (3)..(3): Citrulline
  MOD_RES (8)..(8): Citrulline
VIXGDTLXGFDSTDLS

SEQ ID NO: 3827 - protein, 16 aa, Artificial Sequence
  source: /note="Description of Artificial Sequence: Synthetic peptide"
  MOD_RES (14)..(14): Citrulline
IGVSHLCLEPPKTXGS

SEQ ID NO: 3828 - protein, 16 aa, Artificial Sequence
  source: /note="Description of Artificial Sequence: Synthetic peptide"
  MOD_RES (10)..(10): Citrulline
  MOD_RES (15)..(15): Citrulline
HLCLEPPKTXGSHLXP

SEQ ID NO: 3829 - protein, 16 aa, Artificial Sequence
  source: /note="Description of Artificial Sequence: Synthetic peptide"
  MOD_RES (6)..(6): Citrulline
  MOD_RES (11)..(11): Citrulline
EPPKTXGSHLXPEPPE

SEQ ID NO: 3830 - protein, 16 aa, Artificial Sequence
  source: /note="Description of Artificial Sequence: Synthetic peptide"
  MOD_RES (8)..(8): Citrulline
VAASYDIXGNFLKWQT

SEQ ID NO: 3831 - protein, 16 aa, Artificial Sequence
  source: /note="Description of Artificial Sequence: Synthetic peptide"
  MOD_RES (4)..(4): Citrulline
YDIXGNFLKWQTLEGG

SEQ ID NO: 3832 - protein, 16 aa, Artificial Sequence
  source: /note="Description of Artificial Sequence: Synthetic peptide"
  MOD_RES (7)..(7): Citrulline
  MOD_RES (9)..(9): Citrulline
SQSILVXTXGGNTGVV

SEQ ID NO: 3833 - protein, 16 aa, Artificial Sequence
  source: /note="Description of Artificial Sequence: Synthetic peptide"
  MOD_RES (3)..(3): Citrulline
  MOD_RES (5)..(5): Citrulline
LVXTXGGNTGVVKVQT

SEQ ID NO: 3834 - protein, 16 aa, Artificial Sequence
  source: /note="Description of Artificial Sequence: Synthetic peptide"
  MOD_RES (7)..(7): Citrulline
  MOD_RES (10)..(10): Citrulline
VIDNTWXGSXGDVPIL

SEQ ID NO: 3835 - protein, 16 aa, Artificial Sequence
  source: /note="Description of Artificial Sequence: Synthetic peptide"
  MOD_RES (3)..(3): Citrulline
  MOD_RES (6)..(6): Citrulline
TWXGSXGDVPILTTED

SEQ ID NO: 3836 - protein, 16 aa, Artificial Sequence
  source: /note="Description of Artificial Sequence: Synthetic peptide"
  MOD_RES (12)..(12): Citrulline
  MOD_RES (15)..(15): Citrulline
TAETSDDLSFKXGDXI

SEQ ID NO: 3837 - protein, 16 aa, Artificial Sequence
  source: /note="Description of Artificial Sequence: Synthetic peptide"
  MOD_RES (8)..(8): Citrulline
  MOD_RES (11)..(11): Citrulline
SDDLSFKXGDXIQILE

SEQ ID NO: 3838 - protein, 16 aa, Artificial Sequence
  source: /note="Description of Artificial Sequence: Synthetic peptide"
  MOD_RES (8)..(8): Citrulline
  MOD_RES (15)..(15): Citrulline
EIKDGQIXGTVSSQXQ

SEQ ID NO: 3839 - protein, 16 aa, Artificial Sequence
  source: /note="Description of Artificial Sequence: Synthetic peptide"
  MOD_RES (8)..(8): Citrulline
SPTSPVYXGSSSGPSS

SEQ ID NO: 3840 - protein, 16 aa, Artificial Sequence
  source: /note="Description of Artificial Sequence: Synthetic peptide"
  MOD_RES (10)..(11): Citrulline
AGPGPAPASXXGSMLG

SEQ ID NO: 3841 - protein, 16 aa, Artificial Sequence
  source: /note="Description of Artificial Sequence: Synthetic peptide"
  MOD_RES (6)..(7): Citrulline
PAPASXXGSMLGLAAS

SEQ ID NO: 3842 - protein, 16 aa, Artificial Sequence
  source: /note="Description of Artificial Sequence: Synthetic peptide"
  MOD_RES (5)..(5): Citrulline
MLMYXGEALEDFTGPD

SEQ ID NO: 3843 - protein, 16 aa, Artificial Sequence
  source: /note="Description of Artificial Sequence: Synthetic peptide"
  MOD_RES (10)..(10): Citrulline
  MOD_RES (16)..(16): Citrulline
TATMMNSSSXGSSPTX

SEQ ID NO: 3844 - protein, 16 aa, Artificial Sequence
  source: /note="Description of Artificial Sequence: Synthetic peptide"
  MOD_RES (6)..(6): Citrulline
  MOD_RES (12)..(12): Citrulline
MNSSSXGSSPTXVLDE

SEQ ID NO: 3845 - protein, 16 aa, Artificial Sequence
  source: /note="Description of Artificial Sequence: Synthetic peptide"
  MOD_RES (6)..(7): Citrulline
APPKTXXGSSLHAEPS

SEQ ID NO: 3846 - protein, 16 aa, Artificial Sequence
  source: /note="Description of Artificial Sequence: Synthetic peptide"
  MOD_RES (2)..(3): Citrulline
TXXGSSLHAEPSKTGV

SEQ ID NO: 3847 - protein, 16 aa, Artificial Sequence
  source: /note="Description of Artificial Sequence: Synthetic peptide"
  MOD_RES (3)..(3): Citrulline
  MOD_RES (9)..(9): Citrulline
GQXCSAQSXGAKNSVS

SEQ ID NO: 3848 - protein, 16 aa, Artificial Sequence
  source: /note="Description of Artificial Sequence: Synthetic peptide"
  MOD_RES (5)..(5): Citrulline
  MOD_RES (16)..(16): Citrulline
SAQSXGAKNSVSLMKX

SEQ ID NO: 3849 - protein, 16 aa, Artificial Sequence
  source: /note="Description of Artificial Sequence: Synthetic peptide"
  MOD_RES (1)..(1): Citrulline
  MOD_RES (9)..(9): Citrulline
XQSVSEAVXGSVVLEK

SEQ ID NO: 3850 - protein, 16 aa, Artificial Sequence
  source: /note="Description of Artificial Sequence: Synthetic peptide"
  MOD_RES (5)..(5): Citrulline
SEAVXGSVVLEKAKVV

SEQ ID NO: 3851 - protein, 16 aa, Artificial Sequence
  source: /note="Description of Artificial Sequence: Synthetic peptide"
  MOD_RES (12)..(12): Citrulline
EFPCGFTSPANXGSLS

SEQ ID NO: 3852 - protein, 16 aa, Artificial Sequence
  source: /note="Description of Artificial Sequence: Synthetic peptide"
  MOD_RES (8)..(8): Citrulline
GFTSPANXGSLSTDKD

SEQ ID NO: 3853 - protein, 16 aa, Artificial Sequence
  source: /note="Description of Artificial Sequence: Synthetic peptide"
  MOD_RES (4)..(4): Citrulline
PANXGSLSTDKDTAYG

SEQ ID NO: 3854 - protein, 16 aa, Artificial Sequence
  source: /note="Description of Artificial Sequence: Synthetic peptide"
  MOD_RES (6)..(6): Citrulline
  MOD_RES (10)..(10): Citrulline
GHGIKXEDSXGSLIPE

SEQ ID NO: 3855 - protein, 16 aa, Artificial Sequence
  source: /note="Description of Artificial Sequence: Synthetic peptide"
  MOD_RES (2)..(2): Citrulline
  MOD_RES (6)..(6): Citrulline
KXEDSXGSLIPEGATG

SEQ ID NO: 3856 - protein, 16 aa, Artificial Sequence
  source: /note="Description of Artificial Sequence: Synthetic peptide"
  MOD_RES (2)..(2): Citrulline
SXGSLIPEGATGFPDQ

SEQ ID NO: 3857 - protein, 16 aa, Artificial Sequence
  source: /note="Description of Artificial Sequence: Synthetic peptide"
  MOD_RES (13)..(13): Citrulline
TSPQDTSHQVHHXGKL

SEQ ID NO: 3858 - protein, 16 aa, Artificial Sequence
  source: /note="Description of Artificial Sequence: Synthetic peptide"
  MOD_RES (9)..(9): Citrulline
DTSHQVHHXGKLVGSD

SEQ ID NO: 3859 - protein, 16 aa, Artificial Sequence
  source: /note="Description of Artificial Sequence: Synthetic peptide"
  MOD_RES (5)..(5): Citrulline
  MOD_RES (14)..(14): Citrulline
QVHHXGKLVGSDQXLP

SEQ ID NO: 3860 - protein, 16 aa, Artificial Sequence
  source: /note="Description of Artificial Sequence: Synthetic peptide"
  MOD_RES (11)..(11): Citrulline
DTYGAGDGLKXGALSS

SEQ ID NO: 3861 - protein, 16 aa, Artificial Sequence
  source: /note="Description of Artificial Sequence: Synthetic peptide"
  MOD_RES (7)..(7): Citrulline
  MOD_RES (15)..(15): Citrulline
AGDGLKXGALSSSLXD

SEQ ID NO: 3862 - protein, 16 aa, Artificial Sequence
  source: /note="Description of Artificial Sequence: Synthetic peptide"
  MOD_RES (3)..(3): Citrulline
  MOD_RES (11)..(11): Citrulline
LKXGALSSSLXDLSDA

SEQ ID NO: 3863 - protein, 16 aa, Artificial Sequence
  source: /note="Description of Artificial Sequence: Synthetic peptide"
  MOD_RES (8)..(8): Citrulline
EGSKNEWXGMVLAQAP

SEQ ID NO: 3864 - protein, 16 aa, Artificial Sequence
  source: /note="Description of Artificial Sequence: Synthetic peptide"
  MOD_RES (4)..(4): Citrulline
NEWXGMVLAQAPVMNT

SEQ ID NO: 3865 - protein, 16 aa, Artificial Sequence
  source: /note="Description of Artificial Sequence: Synthetic peptide"
  MOD_RES (4)..(4): Citrulline
  MOD_RES (13)..(13): Citrulline
SQSXGQSPSCQPXGQS

SEQ ID NO: 3866 - protein, 16 aa, Artificial Sequence
  source: /note="Description of Artificial Sequence: Synthetic peptide"
  MOD_RES (9)..(9): Citrulline
  MOD_RES (15)..(15): Citrulline
GQSPSCQPXGQSPLXS

SEQ ID NO: 3867 - protein, 16 aa, Artificial Sequence
  source: /note="Description of Artificial Sequence: Synthetic peptide"
  MOD_RES (5)..(5): Citrulline
  MOD_RES (11)..(11): Citrulline
SCQPXGQSPLXSQAAS

SEQ ID NO: 3868 - protein, 16 aa, Artificial Sequence
  source: /note="Description of Artificial Sequence: Synthetic peptide"
  MOD_RES (8)..(8): Citrulline
  MOD_RES (11)..(11): Citrulline
STLSMHQXIHXGEKPY

SEQ ID NO: 3869 - protein, 16 aa, Artificial Sequence
  source: /note="Description of Artificial Sequence: Synthetic peptide"
  MOD_RES (4)..(4): Citrulline
  MOD_RES (7)..(7): Citrulline
MHQXIHXGEKPYVCTE

SEQ ID NO: 3870 - protein, 16 aa, Artificial Sequence
  source: /note="Description of Artificial Sequence: Synthetic peptide"
  MOD_RES (13)..(13): Citrulline
STQDQQEIYNFKXGSF

SEQ ID NO: 3871 - protein, 16 aa, Artificial Sequence
  source: /note="Description of Artificial Sequence: Synthetic peptide"
  MOD_RES (9)..(9): Citrulline
QQEIYNFKXGSFPGVM

SEQ ID NO: 3872 - protein, 16 aa, Artificial Sequence
  source: /note="Description of Artificial Sequence: Synthetic peptide"
  MOD_RES (5)..(5): Citrulline
YNFKXGSFPGVMPMIQ

SEQ ID NO: 3873 - protein, 16 aa, Artificial Sequence
  source: /note="Description of Artificial Sequence: Synthetic peptide"
  MOD_RES (5)..(5): Citrulline
  MOD_RES (8)..(8): Citrulline
FSFLXGQXQPSVTPEK

SEQ ID NO: 3874 - protein, 16 aa, Artificial Sequence
  source: /note="Description of Artificial Sequence: Synthetic peptide"
  MOD_RES (1)..(1): Citrulline
  MOD_RES (4)..(4): Citrulline
XGQXQPSVTPEKASLQ

SEQ ID NO: 3875 - protein, 16 aa, Artificial Sequence
  source: /note="Description of Artificial Sequence: Synthetic peptide"
  MOD_RES (9)..(10): Citrulline
FLQAAAQYXXGLELSK

SEQ ID NO: 3876 - protein, 16 aa, Artificial Sequence
  source: /note="Description of Artificial Sequence: Synthetic peptide"
  MOD_RES (5)..(6): Citrulline
AAQYXXGLELSKQAAQ

SEQ ID NO: 3877 - protein, 16 aa, Artificial Sequence
  source: /note="Description of Artificial Sequence: Synthetic peptide"
  MOD_RES (1)..(2): Citrulline
XXGLELSKQAAQLGAT

SEQ ID NO: 3878 - protein, 16 aa, Artificial Sequence
  source: /note="Description of Artificial Sequence: Synthetic peptide"
  MOD_RES (11)..(11): Citrulline
THGPWISHVTXGAYLE

SEQ ID NO: 3879 - protein, 16 aa, Artificial Sequence
  source: /note="Description of Artificial Sequence: Synthetic peptide"
  MOD_RES (7)..(7): Citrulline
WISHVTXGAYLEDQLA

SEQ ID NO: 3880 - protein, 16 aa, Artificial Sequence
  source: /note="Description of Artificial Sequence: Synthetic peptide"
  MOD_RES (3)..(3): Citrulline
VTXGAYLEDQLAWDWG

SEQ ID NO: 3881 - protein, 16 aa, Artificial Sequence
  source: /note="Description of Artificial Sequence: Synthetic peptide"
  MOD_RES (3)..(3): Citrulline
  MOD_RES (6)..(6): Citrulline
GPXGDXGSQGPPGPTG

SEQ ID NO: 3882 - protein, 16 aa, Artificial Sequence
  source: /note="Description of Artificial Sequence: Synthetic peptide"
  MOD_RES (7)..(7): Citrulline
FFVSSIXGTIIENTSS

SEQ ID NO: 3883 - protein, 16 aa, Artificial Sequence
  source: /note="Description of Artificial Sequence: Synthetic peptide"
  MOD_RES (6)..(6): Citrulline
MPVHSXGDKKETNHHD

SEQ ID NO: 3884 - protein, 16 aa, Artificial Sequence
  source: /note="Description of Artificial Sequence: Synthetic peptide"
  MOD_RES (2)..(2): Citrulline
SXGDKKETNHHDEMEV

SEQ ID NO: 3885 - protein, 16 aa, Artificial Sequence
  source: /note="Description of Artificial Sequence: Synthetic peptide"
  MOD_RES (6)..(6): Citrulline
GEWYIXGQTICIDKKD

SEQ ID NO: 3886 - protein, 16 aa, Artificial Sequence
  source: /note="Description of Artificial Sequence: Synthetic peptide"
  MOD_RES (2)..(2): Citrulline
IXGQTICIDKKDECPT

SEQ ID NO: 3887 - protein, 16 aa, Artificial Sequence
  source: /note="Description of Artificial Sequence: Synthetic peptide"
  MOD_RES (11)..(11): Citrulline
NGEKMQIGIGXGGSQT

SEQ ID NO: 3888 - protein, 16 aa, Artificial Sequence
  source: /note="Description of Artificial Sequence: Synthetic peptide"
  MOD_RES (7)..(7): Citrulline
MQIGIGXGGSQTNTIS

SEQ ID NO: 3889 - protein, 16 aa, Artificial Sequence
  source: /note="Description of Artificial Sequence: Synthetic peptide"
  MOD_RES (13)..(13): Citrulline
FFNYSQASQPYTXGLP

SEQ ID NO: 3890 - protein, 16 aa, Artificial Sequence
  source: /note="Description of Artificial Sequence: Synthetic peptide"
  MOD_RES (9)..(9): Citrulline
SQASQPYTXGLPLDES

SEQ ID NO: 3891 - protein, 16 aa, Artificial Sequence
  source: /note="Description of Artificial Sequence: Synthetic peptide"
  MOD_RES (5)..(5): Citrulline
QPYTXGLPLDESPAGA

SEQ ID NO: 3892 - protein, 16 aa, Artificial Sequence
  source: /note="Description of Artificial Sequence: Synthetic peptide"
  MOD_RES (6)..(6): Citrulline
  MOD_RES (14)..(14): Citrulline
CCSSAXASCGSALXGS

SEQ ID NO: 3893 - protein, 16 aa, Artificial Sequence
  source: /note="Description of Artificial Sequence: Synthetic peptide"
  MOD_RES (2)..(2): Citrulline
  MOD_RES (10)..(10): Citrulline
AXASCGSALXGSLVCT

SEQ ID NO: 3894 - protein, 16 aa, Artificial Sequence
  source: /note="Description of Artificial Sequence: Synthetic peptide"
  MOD_RES (6)..(6): Citrulline
CGSALXGSLVCTQISA

SEQ ID NO: 3895 - protein, 16 aa, Artificial Sequence
  source: /note="Description of Artificial Sequence: Synthetic peptide"
  MOD_RES (3)..(3): Citrulline
  MOD_RES (9)..(9): Citrulline
GFXAPEVAXGNVIYNQ

SEQ ID NO: 3896 - protein, 16 aa, Artificial Sequence
  source: /note="Description of Artificial Sequence: Synthetic peptide"
  MOD_RES (5)..(5): Citrulline
PEVAXGNVIYNQQADV

SEQ ID NO: 3897 - protein, 16 aa, Artificial Sequence
  source: /note="Description of Artificial Sequence: Synthetic peptide"
  MOD_RES (10)..(10): Citrulline
LLFEDDVDSXGSLFGS

SEQ ID NO: 3898 - protein, 16 aa, Artificial Sequence
  source: /note="Description of Artificial Sequence: Synthetic peptide"
  MOD_RES (6)..(6): Citrulline
DDVDSXGSLFGSPPTS

SEQ ID NO: 3899 - protein, 16 aa, Artificial Sequence
  source: /note="Description of Artificial Sequence: Synthetic peptide"
  MOD_RES (2)..(2): Citrulline
SXGSLFGSPPTSVPPA

SEQ ID NO: 3900 - protein, 16 aa, Artificial Sequence
  source: /note="Description of Artificial Sequence: Synthetic peptide"
  MOD_RES (9)..(9): Citrulline
  MOD_RES (14)..(14): Citrulline
EASVQSAVXGGVQXAI

SEQ ID NO: 3901 - protein, 16 aa, Artificial Sequence
  source: /note="Description of Artificial Sequence: Synthetic peptide"
  MOD_RES (5)..(5): Citrulline
  MOD_RES (10)..(10): Citrulline
QSAVXGGVQXAILTQL

SEQ ID NO: 3902 - protein, 16 aa, Artificial Sequence
  source: /note="Description of Artificial Sequence: Synthetic peptide"
  MOD_RES (7)..(7): Citrulline
  MOD_RES (12)..(12): Citrulline
PAAPVPXGTASXAAGF

SEQ ID NO: 3903 - protein, 16 aa, Artificial Sequence
  source: /note="Description of Artificial Sequence: Synthetic peptide"
  MOD_RES (3)..(3): Citrulline
  MOD_RES (8)..(8): Citrulline
VPXGTASXAAGFPAGQ

SEQ ID NO: 3904 - protein, 16 aa, Artificial Sequence
  source: /note="Description of Artificial Sequence: Synthetic peptide"
  MOD_RES (6)..(7): Citrulline
SSEDGXXGQLLPQSPA

SEQ ID NO: 3905 - protein, 16 aa, Artificial Sequence
  source: /note="Description of Artificial Sequence: Synthetic peptide"
  MOD_RES (2)..(3): Citrulline
GXXGQLLPQSPAPCSP

SEQ ID NO: 3906 - protein, 16 aa, Artificial Sequence
  source: /note="Description of Artificial Sequence: Synthetic peptide"
  MOD_RES (11)..(11): Citrulline
  MOD_RES (13)..(13): Citrulline
VTWQEGKGPVXGXVQS

SEQ ID NO: 3907 - protein, 16 aa, Artificial Sequence
  source: /note="Description of Artificial Sequence: Synthetic peptide"
  MOD_RES (7)..(7): Citrulline
  MOD_RES (9)..(9): Citrulline
EGKGPVXGXVQSFWGS

SEQ ID NO: 3908 - protein, 16 aa, Artificial Sequence
  source: /note="Description of Artificial Sequence: Synthetic peptide"
  MOD_RES (9)..(9): Citrulline
  MOD_RES (11)..(11): Citrulline
AVADASVPXTXGEELT

SEQ ID NO: 3909 - protein, 16 aa, Artificial Sequence
  source: /note="Description of Artificial Sequence: Synthetic peptide"
  MOD_RES (5)..(5): Citrulline
  MOD_RES (7)..(7): Citrulline
ASVPXTXGEELTGLMA

SEQ ID NO: 3910 - protein, 16 aa, Artificial Sequence
  source: /note="Description of Artificial Sequence: Synthetic peptide"
  MOD_RES (7)..(7): Citrulline
  MOD_RES (10)..(10): Citrulline
LDYEDGXGSXHAYSTQ

SEQ ID NO: 3911 - protein, 16 aa, Artificial Sequence
  source: /note="Description of Artificial Sequence: Synthetic peptide"
  MOD_RES (3)..(3): Citrulline
  MOD_RES (6)..(6): Citrulline
DGXGSXHAYSTQSDTS

SEQ ID NO: 3912 - protein, 16 aa, Artificial Sequence
  source: /note="Description of Artificial Sequence: Synthetic peptide"
  MOD_RES (3)..(3): Citrulline
  MOD_RES (7)..(7): Citrulline
LQXAVEXGQLEQITGK

SEQ ID NO: 3913 - protein, 16 aa, Artificial Sequence
  source: /note="Description of Artificial Sequence: Synthetic peptide"
  MOD_RES (3)..(3): Citrulline
VEXGQLEQITGKGASG

SEQ ID NO: 3914 - protein, 16 aa, Artificial Sequence
  source: /note="Description of Artificial Sequence: Synthetic peptide"
  MOD_RES (11)..(11): Citrulline
FMNIYQQEGTXGLWKG

SEQ ID NO: 3915 - protein, 16 aa, Artificial Sequence
  source: /note="Description of Artificial Sequence: Synthetic peptide"
  MOD_RES (7)..(7): Citrulline
YQQEGTXGLWKGVSLT

SEQ ID NO: 3916 - protein, 16 aa, Artificial Sequence
  source: /note="Description of Artificial Sequence: Synthetic peptide"
  MOD_RES (6)..(6): Citrulline
  MOD_RES (8)..(8): Citrulline
ATQQEXVXGALALQPP

SEQ ID NO: 3917 - protein, 16 aa, Artificial Sequence
  source: /note="Description of Artificial Sequence: Synthetic peptide"
  MOD_RES (2)..(2): Citrulline
  MOD_RES (4)..(4): Citrulline
EXVXGALALQPPPAPA

SEQ ID NO: 3918 - protein, 16 aa, Artificial Sequence
  source: /note="Description of Artificial Sequence: Synthetic peptide"
  MOD_RES (8)..(8): Citrulline
  MOD_RES (12)..(12): Citrulline
EGGPAQSXGAGXGGPQ

SEQ ID NO: 3919 - protein, 16 aa, Artificial Sequence
  source: /note="Description of Artificial Sequence: Synthetic peptide"
  MOD_RES (4)..(4): Citrulline
  MOD_RES (8)..(8): Citrulline
AQSXGAGXGGPQQQGY

SEQ ID NO: 3920 - protein, 16 aa, Artificial Sequence
  source: /note="Description of Artificial Sequence: Synthetic peptide"
  MOD_RES (13)..(13): Citrulline
KAQQTPSAQDYGXGNI

SEQ ID NO: 3921 - protein, 16 aa, Artificial Sequence
  source: /note="Description of Artificial Sequence: Synthetic peptide"
  MOD_RES (9)..(9): Citrulline
TPSAQDYGXGNIISPS

SEQ ID NO: 3922 - protein, 16 aa, Artificial Sequence
  source: /note="Description of Artificial Sequence: Synthetic peptide"
  MOD_RES (5)..(5): Citrulline
  MOD_RES (13)..(13): Citrulline
QDYGXGNIISPSXMLD

SEQ ID NO: 3923 - protein, 16 aa, Artificial Sequence
  source: /note="Description of Artificial Sequence: Synthetic peptide"
  MOD_RES (8)..(8): Citrulline
MDISAMPXGTPLYGQP

SEQ ID NO: 3924 - protein, 16 aa, Artificial Sequence
  source: /note="Description of Artificial Sequence: Synthetic peptide"
  MOD_RES (4)..(4): Citrulline
AMPXGTPLYGQPSWWG

SEQ ID NO: 3925 - protein, 16 aa, Artificial Sequence
  source: /note="Description of Artificial Sequence: Synthetic peptide"
  MOD_RES (7)..(7): Citrulline
TLKVSPXGIILTDNLT

SEQ ID NO: 3926 - protein, 16 aa, Artificial Sequence
  source: /note="Description of Artificial Sequence: Synthetic peptide"
  MOD_RES (3)..(3): Citrulline
SPXGIILTDNLTNQLI

SEQ ID NO: 3927 - protein, 16 aa, Artificial Sequence
  source: /note="Description of Artificial Sequence: Synthetic peptide"
  MOD_RES (12)..(12): Citrulline
AGALQASLGLVXGQLQ

SEQ ID NO: 3928 - protein, 16 aa, Artificial Sequence
  source: /note="Description of Artificial Sequence: Synthetic peptide"
  MOD_RES (8)..(8): Citrulline
QASLGLVXGQLQDNPA

SEQ ID NO: 3929 - protein, 16 aa, Artificial Sequence
  source: /note="Description of Artificial Sequence: Synthetic peptide"
  MOD_RES (11)..(11): Citrulline
IPGYLPISSPXGSQLM

SEQ ID NO: 3930 - protein, 16 aa, Artificial Sequence
  source: /note="Description of Artificial Sequence: Synthetic peptide"
  MOD_RES (7)..(7): Citrulline
LPISSPXGSQLMASWD

SEQ ID NO: 3931 - protein, 16 aa, Artificial Sequence
  source: /note="Description of Artificial Sequence: Synthetic peptide"
  MOD_RES (3)..(3): Citrulline
SPXGSQLMASWDACVV

SEQ ID NO: 3932 - protein, 16 aa, Artificial Sequence
  source: /note="Description of Artificial Sequence: Synthetic peptide"
  MOD_RES (9)..(9): Citrulline
VEPVDSIAXGALGAAE

SEQ ID NO: 3933 - protein, 16 aa, Artificial Sequence
  source: /note="Description of Artificial Sequence: Synthetic peptide"
  MOD_RES (6)..(6): Citrulline
  MOD_RES (10)..(10): Citrulline
LGPFPXEVGXGAPLAP

SEQ ID NO: 3934 - protein, 16 aa, Artificial Sequence
  source: /note="Description of Artificial Sequence: Synthetic peptide"
  MOD_RES (2)..(2): Citrulline
  MOD_RES (11)..(11): Citrulline
GXGAPLAPGAXNPATA

SEQ ID NO: 3935 - protein, 16 aa, Artificial Sequence
  source: /note="Description of Artificial Sequence: Synthetic peptide"
  MOD_RES (4)..(4): Citrulline
  MOD_RES (9)..(9): Citrulline
TLAXKLQSXGFPSQGN

SEQ ID NO: 3936 - protein, 16 aa, Artificial Sequence
  source: /note="Description of Artificial Sequence: Synthetic peptide"
  MOD_RES (5)..(5): Citrulline
KLQSXGFPSQGNVLDD

SEQ ID NO: 3937 - protein, 16 aa, Artificial Sequence
  source: /note="Description of Artificial Sequence: Synthetic peptide"
  MOD_RES (4)..(4): Citrulline
  MOD_RES (6)..(6): Citrulline
VLVXIXGGAENTAPKP

SEQ ID NO: 3938 - protein, 16 aa, Artificial Sequence
  source: /note="Description of Artificial Sequence: Synthetic peptide"
  MOD_RES (2)..(2): Citrulline
IXGGAENTAPKPSFVA

SEQ ID NO: 3939 - protein, 16 aa, Artificial Sequence
  source: /note="Description of Artificial Sequence: Synthetic peptide"
  MOD_RES (11)..(11): Citrulline
PQGGSQPGPSXGLSLM

SEQ ID NO: 3940 - protein, 16 aa, Artificial Sequence
  source: /note="Description of Artificial Sequence: Synthetic peptide"
  MOD_RES (7)..(7): Citrulline
SQPGPSXGLSLMSSQG

SEQ ID NO: 3941 - protein, 16 aa, Artificial Sequence
  source: /note="Description of Artificial Sequence: Synthetic peptide"
  MOD_RES (11)..(11): Citrulline
NEAKLGYSMTXGKIGF

SEQ ID NO: 3942 - protein, 12 aa, Artificial Sequence
  source: /note="Description of Artificial Sequence: Synthetic peptide"
  MOD_RES (7)..(7): Citrulline
LGYSMTXGKIGF

SEQ ID NO: 3943 - protein, 16 aa, Artificial Sequence
  source: /note="Description of Artificial Sequence: Synthetic peptide"
  MOD_RES (11)..(11): Citrulline
LLCALKNNYNXGNIPS

SEQ ID NO: 3944 - protein, 16 aa, Artificial Sequence
  source: /note="Description of Artificial Sequence: Synthetic peptide"
  MOD_RES (7)..(7): Citrulline
LKNNYNXGNIPSEASG

SEQ ID NO: 3945 - protein, 16 aa, Artificial Sequence
  source: /note="Description of Artificial Sequence: Synthetic peptide"
  MOD_RES (3)..(3): Citrulline
YNXGNIPSEASGLYKG

SEQ ID NO: 3946 - protein, 16 aa, Artificial Sequence
  source: /note="Description of Artificial Sequence: Synthetic peptide"
  MOD_RES (2)..(2): Citrulline
  MOD_RES (6)..(6): Citrulline
FXSLKXGWSVKMGPAL

SEQ ID NO: 3947 - protein, 16 aa, Artificial Sequence
  source: /note="Description of Artificial Sequence: Synthetic peptide"
  MOD_RES (2)..(2): Citrulline
KXGWSVKMGPALEDFS

SEQ ID NO: 3948 - protein, 16 aa, Artificial Sequence
  source: /note="Description of Artificial Sequence: Synthetic peptide"
  MOD_RES (10)..(11): Citrulline
FGVVQGMKTXXGDVTF

SEQ ID NO: 3949 - protein, 16 aa, Artificial Sequence
  source: /note="Description of Artificial Sequence: Synthetic peptide"
  MOD_RES (6)..(7): Citrulline
QGMKTXXGDVTFLEDV

SEQ ID NO: 3950 - protein, 16 aa, Artificial Sequence
  source: /note="Description of Artificial Sequence: Synthetic peptide"
  MOD_RES (7)..(7): Citrulline
  MOD_RES (12)..(12): Citrulline
YKFSWDXVFQSXGDTG

SEQ ID NO: 3951 - protein, 16 aa, Artificial Sequence
  source: /note="Description of Artificial Sequence: Synthetic peptide"
  MOD_RES (3)..(3): Citrulline
  MOD_RES (8)..(8): Citrulline
WDXVFQSXGDTGVFLQ

SEQ ID NO: 3952 - protein, 16 aa, Artificial Sequence
  source: /note="Description of Artificial Sequence: Synthetic peptide"
  MOD_RES (8)..(8): Citrulline
LKETDLLXGQLTKVQA

SEQ ID NO: 3953 - protein, 16 aa, Artificial Sequence
  source: /note="Description of Artificial Sequence: Synthetic peptide"
  MOD_RES (4)..(4): Citrulline
DLLXGQLTKVQAKLSE

SEQ ID NO: 3954 - protein, 16 aa, Artificial Sequence
  source: /note="Description of Artificial Sequence: Synthetic peptide"
  MOD_RES (6)..(6): Citrulline
  MOD_RES (15)..(15): Citrulline
GTEATXGSSVSEAEXL

SEQ ID NO: 3955 - protein, 16 aa, Artificial Sequence
  source: /note="Description of Artificial Sequence: Synthetic peptide"
  MOD_RES (8)..(8): Citrulline
FSLNMTTXGEDFLYKS

SEQ ID NO: 3956 - protein, 16 aa, Artificial Sequence
  source: /note="Description of Artificial Sequence: Synthetic peptide"
  MOD_RES (8)..(8): Citrulline
  MOD_RES (11)..(11): Citrulline
ELPEKGSXGSXGSQID

SEQ ID NO: 3957 - protein, 16 aa, Artificial Sequence
  source: /note="Description of Artificial Sequence: Synthetic peptide"
  MOD_RES (4)..(4): Citrulline
  MOD_RES (7)..(7): Citrulline
KGSXGSXGSQIDSHSS

SEQ ID NO: 3958 - protein, 16 aa, Artificial Sequence
  source: /note="Description of Artificial Sequence: Synthetic peptide"
  MOD_RES (3)..(3): Citrulline
GSXGSQIDSHSSNSNY

SEQ ID NO: 3959 - protein, 16 aa, Artificial Sequence
  source: /note="Description of Artificial Sequence: Synthetic peptide"
  MOD_RES (11)..(11): Citrulline
HQLNAPLWQIXGTEKS

SEQ ID NO: 3960 - protein, 16 aa, Artificial Sequence
  source: /note="Description of Artificial Sequence: Synthetic peptide"
  MOD_RES (7)..(7): Citrulline
  MOD_RES (15)..(15): Citrulline
APLWQIXGTEKSSVXE

SEQ ID NO: 3961 - protein, 16 aa, Artificial Sequence
  source: /note="Description of Artificial Sequence: Synthetic peptide"
  MOD_RES (10)..(10): Citrulline
MNVTPEVKSXGMKFAE

SEQ ID NO: 3962 - protein, 16 aa, Artificial Sequence
  source: /note="Description of Artificial Sequence: Synthetic peptide"
  MOD_RES (6)..(6): Citrulline
PEVKSXGMKFAEEQLL

SEQ ID NO: 3963 - protein, 16 aa, Artificial Sequence
  source: /note="Description of Artificial Sequence: Synthetic peptide"
  MOD_RES (2)..(2): Citrulline
SXGMKFAEEQLLKHGW

SEQ ID NO: 3964 - protein, 16 aa, Artificial Sequence
  source: /note="Description of Artificial Sequence: Synthetic peptide"
  MOD_RES (3)..(3): Citrulline
  MOD_RES (9)..(9): Citrulline
SFXTLISPXGMKLVEI

SEQ ID NO: 3965 - protein, 16 aa, Artificial Sequence
  source: /note="Description of Artificial Sequence: Synthetic peptide"
  MOD_RES (5)..(5): Citrulline
LISPXGMKLVEILQQP

SEQ ID NO: 3966 - protein, 16 aa, Artificial Sequence
  source: /note="Description of Artificial Sequence: Synthetic peptide"
  MOD_RES (1)..(1): Citrulline
XGMKLVEILQQPSLTM

SEQ ID NO: 3967 - protein, 16 aa, Artificial Sequence
  source: /note="Description of Artificial Sequence: Synthetic peptide"
  MOD_RES (2)..(2): Citrulline
  MOD_RES (9)..(9): Citrulline
EXLSNGNSXGSVSKSS

SEQ ID NO: 3968 - protein, 16 aa, Artificial Sequence
  source: /note="Description of Artificial Sequence: Synthetic peptide"
  MOD_RES (5)..(5): Citrulline
  MOD_RES (13)..(13): Citrulline
NGNSXGSVSKSSXNIP

SEQ ID NO: 3969 - protein, 16 aa, Artificial Sequence
  source: /note="Description of Artificial Sequence: Synthetic peptide"
  MOD_RES (7)..(8): Citrulline
ETSEKYXXGQMDLDFP

SEQ ID NO: 3970 - protein, 16 aa, Artificial Sequence
  source: /note="Description of Artificial Sequence: Synthetic peptide"
  MOD_RES (3)..(4): Citrulline
KYXXGQMDLDFPSNLM

SEQ ID NO: 3971 - protein, 16 aa, Artificial Sequence
  source: /note="Description of Artificial Sequence: Synthetic peptide"
  MOD_RES (7)..(7): Citrulline
  MOD_RES (10)..(10): Citrulline
TALTSEXLFXGKLQEV

SEQ ID NO: 3972 - protein, 16 aa, Artificial Sequence
  source: /note="Description of Artificial Sequence: Synthetic peptide"
  MOD_RES (3)..(3): Citrulline
  MOD_RES (6)..(6): Citrulline
SEXLFXGKLQEVTKSS

SEQ ID NO: 3973 - protein, 16 aa, Artificial Sequence
  source: /note="Description of Artificial Sequence: Synthetic peptide"
  MOD_RES (5)..(5): Citrulline
  MOD_RES (11)..(11): Citrulline
NSLTXVDGQPXGAAIA

SEQ ID NO: 3974 - protein, 16 aa, Artificial Sequence
  source: /note="Description of Artificial Sequence: Synthetic peptide"
  MOD_RES (1)..(1): Citrulline
  MOD_RES (7)..(7): Citrulline
XVDGQPXGAAIAWPEK

SEQ ID NO: 3975 - protein, 16 aa, Artificial Sequence
  source: /note="Description of Artificial Sequence: Synthetic peptide"
  MOD_RES (3)..(3): Citrulline
  MOD_RES (15)..(15): Citrulline
QPXGAAIAWPEKKTXP

SEQ ID NO: 3976 - protein, 16 aa, Artificial Sequence
  source: /note="Description of Artificial Sequence: Synthetic peptide"
  MOD_RES (13)..(13): Citrulline
  MOD_RES (15)..(15): Citrulline
IKMCPQNTSIPIXGXV

SEQ ID NO: 3977 - protein, 16 aa, Artificial Sequence
  source: /note="Description of Artificial Sequence: Synthetic peptide"
  MOD_RES (9)..(9): Citrulline
  MOD_RES (11)..(11): Citrulline
PQNTSIPIXGXVLIGS

SEQ ID NO: 3978 - protein, 16 aa, Artificial Sequence
  source: /note="Description of Artificial Sequence: Synthetic peptide"
  MOD_RES (5)..(5): Citrulline
  MOD_RES (7)..(7): Citrulline
SIPIXGXVLIGSDQFQ

SEQ ID NO: 3979 - protein, 16 aa, Artificial Sequence
  source: /note="Description of Artificial Sequence: Synthetic peptide"
  MOD_RES (13)..(13): Citrulline
  MOD_RES (15)..(15): Citrulline
SEPPPWQAPIEAXGXK

SEQ ID NO: 3980 - protein, 16 aa, Artificial Sequence
  source: /note="Description of Artificial Sequence: Synthetic peptide"
  MOD_RES (9)..(9): Citrulline
  MOD_RES (11)..(11): Citrulline
PWQAPIEAXGXKQASA

SEQ ID NO: 3981 - protein, 16 aa, Artificial Sequence
  source: /note="Description of Artificial Sequence: Synthetic peptide"
  MOD_RES (5)..(5): Citrulline
  MOD_RES (7)..(7): Citrulline
PIEAXGXKQASANIFQ

SEQ ID NO: 3982 - protein, 16 aa, Artificial Sequence
  source: /note="Description of Artificial Sequence: Synthetic peptide"
  MOD_RES (7)..(7): Citrulline
  MOD_RES (11)..(11): Citrulline
HGGLGTXFSGXGSASL

SEQ ID NO: 3983 - protein, 16 aa, Artificial Sequence
  source: /note="Description of Artificial Sequence: Synthetic peptide"
  MOD_RES (3)..(3): Citrulline
  MOD_RES (7)..(7): Citrulline
GTXFSGXGSASLTAPP

SEQ ID NO: 3984 - protein, 16 aa, Artificial Sequence
  source: /note="Description of Artificial Sequence: Synthetic peptide"
  MOD_RES (3)..(3): Citrulline
  MOD_RES (14)..(14): Citrulline
SGXGSASLTAPPGXCF

SEQ ID NO: 3985 - protein, 16 aa, Artificial Sequence
  source: /note="Description of Artificial Sequence: Synthetic peptide"
  MOD_RES (13)..(13): Citrulline
QQSLTVAAPGSTXGKV

SEQ ID NO: 3986 - protein, 16 aa, Artificial Sequence
  source: /note="Description of Artificial Sequence: Synthetic peptide"
  MOD_RES (9)..(9): Citrulline
TVAAPGSTXGKVHPLT

SEQ ID NO: 3987 - protein, 16 aa, Artificial Sequence
  source: /note="Description of Artificial Sequence: Synthetic peptide"
  MOD_RES (6)..(6): Citrulline
  MOD_RES (10)..(10): Citrulline
KVSGKXGGSXGSPSQE

SEQ ID NO: 3988 - protein, 16 aa, Artificial Sequence
  source: /note="Description of Artificial Sequence: Synthetic peptide"
  MOD_RES (2)..(2): Citrulline
  MOD_RES (6)..(6): Citrulline
KXGGSXGSPSQEWVIH

SEQ ID NO: 3989 - protein, 16 aa, Artificial Sequence
  source: /note="Description of Artificial Sequence: Synthetic peptide"
  MOD_RES (10)..(10): Citrulline
APAAQGAFLXGSGLSL

SEQ ID NO: 3990 - protein, 16 aa, Artificial Sequence
  source: /note="Description of Artificial Sequence: Synthetic peptide"
  MOD_RES (6)..(6): Citrulline
  MOD_RES (16)..(16): Citrulline
QGAFLXGSGLSLASGX

SEQ ID NO: 3991 - protein, 16 aa, Artificial Sequence
  source: /note="Description of Artificial Sequence: Synthetic peptide"
  MOD_RES (10)..(10): Citrulline
EIVLFDKPTXGTTVQK

SEQ ID NO: 3992 - protein, 16 aa, Artificial Sequence
  source: /note="Description of Artificial Sequence: Synthetic peptide"
  MOD_RES (6)..(6): Citrulline
FDKPTXGTTVQKFKEM

SEQ ID NO: 3993 - protein, 16 aa, Artificial Sequence
  source: /note="Description of Artificial Sequence: Synthetic peptide"
  MOD_RES (12)..(12): Citrulline
KACQLLKDYLLXGAPS

SEQ ID NO: 3994 - protein, 16 aa, Artificial Sequence
  source: /note="Description of Artificial Sequence: Synthetic peptide"
  MOD_RES (8)..(8): Citrulline
  MOD_RES (15)..(15): Citrulline
LLKDYLLXGAPSEIXE

SEQ ID NO: 3995 - protein, 16 aa, Artificial Sequence
  source: /note="Description of Artificial Sequence: Synthetic peptide"
  MOD_RES (13)..(13): Citrulline
IYGLQPNLVPEFXGVM

SEQ ID NO: 3996 - protein, 16 aa, Artificial Sequence
  source: /note="Description of Artificial Sequence: Synthetic peptide"
  MOD_RES (9)..(9): Citrulline
QPNLVPEFXGVMKVDI

SEQ ID NO: 3997 - protein, 16 aa, Artificial Sequence
  source: /note="Description of Artificial Sequence: Synthetic peptide"
  MOD_RES (5)..(5): Citrulline
VPEFXGVMKVDINLQK

SEQ ID NO: 3998 - protein, 16 aa, Artificial Sequence
  source: /note="Description of Artificial Sequence: Synthetic peptide"
  MOD_RES (4)..(4): Citrulline
ENVXGSYNSSNNFQQP

SEQ ID NO: 3999 - protein, 16 aa, Artificial Sequence
  source: /note="Description of Artificial Sequence: Synthetic peptide"
  MOD_RES (8)..(8): Citrulline
KGSEGPAXGLPSLPLA

SEQ ID NO: 4000 - protein, 16 aa, Artificial Sequence
  source: /note="Description of Artificial Sequence: Synthetic peptide"
  MOD_RES (4)..(4): Citrulline
GPAXGLPSLPLAGFSP

SEQ ID NO: 4001 - protein, 16 aa, Artificial Sequence
  source: /note="Description of Artificial Sequence: Synthetic peptide"
  MOD_RES (12)..(12): Citrulline
KYTELQLEAAKXGILS

SEQ ID NO: 4002 - protein, 16 aa, Artificial Sequence
  source: /note="Description of Artificial Sequence: Synthetic peptide"
  MOD_RES (8)..(8): Citrulline
  MOD_RES (15)..(15): Citrulline
LQLEAAKXGILSSGXG

SEQ ID NO: 4003 - protein, 16 aa, Artificial Sequence
  source: /note="Description of Artificial Sequence: Synthetic peptide"
  MOD_RES (13)..(13): Citrulline
ASPAPASSPGFYXGAY

SEQ ID NO: 4004 - protein, 16 aa, Artificial Sequence
  source: /note="Description of Artificial Sequence: Synthetic peptide"
  MOD_RES (9)..(9): Citrulline
PASSPGFYXGAYPTPS

SEQ ID NO: 4005 - protein, 16 aa, Artificial Sequence
  source: /note="Description of Artificial Sequence: Synthetic peptide"
  MOD_RES (3)..(3): Citrulline
  MOD_RES (12)..(12): Citrulline
GPXGPPGQPGTXGFPG

SEQ ID NO: 4006 - protein, 16 aa, Artificial Sequence
  source: /note="Description of Artificial Sequence: Synthetic peptide"
  MOD_RES (8)..(8): Citrulline
PPGQPGTXGFPGFPGP

SEQ ID NO: 4007 - protein, 16 aa, Artificial Sequence
  source: /note="Description of Artificial Sequence: Synthetic peptide"
  MOD_RES (4)..(4): Citrulline
  MOD_RES (12)..(12): Citrulline
FAKXCDIGDASXGSLS

SEQ ID NO: 4008 - protein, 16 aa, Artificial Sequence
  source: /note="Description of Artificial Sequence: Synthetic peptide"
  MOD_RES (3)..(3): Citrulline
  MOD_RES (12)..(12): Citrulline
LAXNLNVMSFTXGADV

SEQ ID NO: 4009 - protein, 16 aa, Artificial Sequence
  source: /note="Description of Artificial Sequence: Synthetic peptide"
  MOD_RES (8)..(8): Citrulline
  MOD_RES (13)..(13): Citrulline
LNVMSFTXGADVXGDL

SEQ ID NO: 4010 - protein, 16 aa, Artificial Sequence
  source: /note="Description of Artificial Sequence: Synthetic peptide"
  MOD_RES (4)..(4): Citrulline
  MOD_RES (9)..(9): Citrulline
SFTXGADVXGDLQPVI

SEQ ID NO: 4011 - protein, 16 aa, Artificial Sequence
  source: /note="Description of Artificial Sequence: Synthetic peptide"
  MOD_RES (9)..(9): Citrulline
YLKPLSSAXGVGLNST

SEQ ID NO: 4012 - protein, 16 aa, Artificial Sequence
  source: /note="Description of Artificial Sequence: Synthetic peptide"
  MOD_RES (5)..(5): Citrulline
LSSAXGVGLNSTTQSV

SEQ ID NO: 4013 - protein, 16 aa, Artificial Sequence
  source: /note="Description of Artificial Sequence: Synthetic peptide"
  MOD_RES (4)..(4): Citrulline
  MOD_RES (6)..(6): Citrulline
AAVXAXGCQFLGPAMQ

SEQ ID NO: 4014 - protein, 16 aa, Artificial Sequence
  source: /note="Description of Artificial Sequence: Synthetic peptide"
  MOD_RES (2)..(2): Citrulline
AXGCQFLGPAMQEEAL

SEQ ID NO: 4015 - protein, 16 aa, Artificial Sequence
  source: /note="Description of Artificial Sequence: Synthetic peptide"
  MOD_RES (14)..(14): Citrulline
IVSTGNTVTQLIPXGT

SEQ ID NO: 4016 - protein, 16 aa, Artificial Sequence
  source: /note="Description of Artificial Sequence: Synthetic peptide"
  MOD_RES (10)..(10): Citrulline
GNTVTQLIPXGTDPSY

SEQ ID NO: 4017 - protein, 16 aa, Artificial Sequence
  source: /note="Description of Artificial Sequence: Synthetic peptide"
  MOD_RES (6)..(6): Citrulline
TQLIPXGTDPSYDSSL

SEQ ID NO: 4018 - protein, 16 aa, Artificial Sequence
  source: /note="Description of Artificial Sequence: Synthetic peptide"
  MOD_RES (11)..(11): Citrulline
PVTKPLQMVPXGSQLY

SEQ ID NO: 4019 - protein, 16 aa, Artificial Sequence
  source: /note="Description of Artificial Sequence: Synthetic peptide"
  MOD_RES (7)..(7): Citrulline
PLQMVPXGSQLYPAQQ

SEQ ID NO: 4020 - protein, 16 aa, Artificial Sequence
  source: /note="Description of Artificial Sequence: Synthetic peptide"
  MOD_RES (3)..(3): Citrulline
VPXGSQLYPAQQTDVY

SEQ ID NO: 4021 - protein, 16 aa, Artificial Sequence
  source: /note="Description of Artificial Sequence: Synthetic peptide"
  MOD_RES (2)..(2): Citrulline
  MOD_RES (9)..(9): Citrulline
PXGFGFSLXGGKEYNM

SEQ ID NO: 4022 - protein, 16 aa, Artificial Sequence
  source: /note="Description of Artificial Sequence: Synthetic peptide"
  MOD_RES (5)..(5): Citrulline
GFSLXGGKEYNMGLFI

SEQ ID NO: 4023 - protein, 16 aa, Artificial Sequence
  source: /note="Description of Artificial Sequence: Synthetic peptide"
  MOD_RES (9)..(9): Citrulline
EPEASHDTXGSWLPEE

SEQ ID NO: 4024 - protein, 16 aa, Artificial Sequence
  source: /note="Description of Artificial Sequence: Synthetic peptide"
  MOD_RES (5)..(5): Citrulline
SHDTXGSWLPEEFEAS

SEQ ID NO: 4025 - protein, 16 aa, Artificial Sequence
  source: /note="Description of Artificial Sequence: Synthetic peptide"
  MOD_RES (8)..(9): Citrulline
GEDELSLXXGQLVEVL

SEQ ID NO: 4026 - protein, 16 aa, Artificial Sequence
  source: /note="Description of Artificial Sequence: Synthetic peptide"
  MOD_RES (4)..(5): Citrulline
LSLXXGQLVEVLSQDA

SEQ ID NO: 4027 - protein, 16 aa, Artificial Sequence
  source: /note="Description of Artificial Sequence: Synthetic peptide"
  MOD_RES (10)..(10): Citrulline
SCISDGISFXGGQKAE

SEQ ID NO: 4028 - protein, 16 aa, Artificial Sequence
  source: /note="Description of Artificial Sequence: Synthetic peptide"
  MOD_RES (6)..(6): Citrulline
DGISFXGGQKAEVIDK

SEQ ID NO: 4029 - protein, 16 aa, Artificial Sequence
  source: /note="Description of Artificial Sequence: Synthetic peptide"
  MOD_RES (2)..(2): Citrulline
FXGGQKAEVIDKNSGG

SEQ ID NO: 4030 - protein, 16 aa, Artificial Sequence
  source: /note="Description of Artificial Sequence: Synthetic peptide"
  MOD_RES (5)..(5): Citrulline
  MOD_RES (14)..(14): Citrulline
ALKTXGMLTQQEIXSI

SEQ ID NO: 4031 - protein, 16 aa, Artificial Sequence
  source: /note="Description of Artificial Sequence: Synthetic peptide"
  MOD_RES (8)..(8): Citrulline
  MOD_RES (14)..(14): Citrulline
VTSGVSPXGSTSPXTL

SEQ ID NO: 4032 - protein, 16 aa, Artificial Sequence
  source: /note="Description of Artificial Sequence: Synthetic peptide"
  MOD_RES (4)..(4): Citrulline
  MOD_RES (10)..(10): Citrulline
VSPXGSTSPXTLNIFD

SEQ ID NO: 4033 - protein, 16 aa, Artificial Sequence
  source: /note="Description of Artificial Sequence: Synthetic peptide"
  MOD_RES (4)..(4): Citrulline
  MOD_RES (12)..(12): Citrulline
TGSXTGPPASIXGGGG

SEQ ID NO: 4034 - protein, 16 aa, Artificial Sequence
  source: /note="Description of Artificial Sequence: Synthetic peptide"
  MOD_RES (9)..(9): Citrulline
  MOD_RES (13)..(13): Citrulline
DLASHLGIXGSPXDSD

SEQ ID NO: 4035 - protein, 16 aa, Artificial Sequence
  source: /note="Description of Artificial Sequence: Synthetic peptide"
  MOD_RES (5)..(5): Citrulline
  MOD_RES (9)..(9): Citrulline
HLGIXGSPXDSDAESD

SEQ ID NO: 4036 - protein, 16 aa, Artificial Sequence
  source: /note="Description of Artificial Sequence: Synthetic peptide"
  MOD_RES (9)..(9): Citrulline
GLESGASGXGSYYSTG

SEQ ID NO: 4037 - protein, 16 aa, Artificial Sequence
  source: /note="Description of Artificial Sequence: Synthetic peptide"
  MOD_RES (5)..(5): Citrulline
GASGXGSYYSTGAPSG

SEQ ID NO: 4038 - protein, 16 aa, Artificial Sequence
  source: /note="Description of Artificial Sequence: Synthetic peptide"
  MOD_RES (7)..(7): Citrulline
  MOD_RES (15)..(15): Citrulline
SALPAQXGLATFPSXG

SEQ ID NO: 4039 - protein, 16 aa, Artificial Sequence
  source: /note="Description of Artificial Sequence: Synthetic peptide"
  MOD_RES (3)..(3): Citrulline
  MOD_RES (11)..(11): Citrulline
AQXGLATFPSXGAKAS

SEQ ID NO: 4040 - protein, 16 aa, Artificial Sequence
  source: /note="Description of Artificial Sequence: Synthetic peptide"
  MOD_RES (7)..(7): Citrulline
LATFPSXGAKASPVAV

SEQ ID NO: 4041 - protein, 16 aa, Artificial Sequence
  source: /note="Description of Artificial Sequence: Synthetic peptide"
  MOD_RES (3)..(3): Citrulline
PSXGAKASPVAVGSSG

SEQ ID NO: 4042 - protein, 16 aa, Artificial Sequence
  source: /note="Description of Artificial Sequence: Synthetic peptide"
  MOD_RES (5)..(5): Citrulline
  MOD_RES (14)..(14): Citrulline
NVCTXAGFMSKTQXGS

SEQ ID NO: 4043 - protein, 16 aa, Artificial Sequence
  source: /note="Description of Artificial Sequence: Synthetic peptide"
  MOD_RES (1)..(1): Citrulline
  MOD_RES (10)..(10): Citrulline
XAGFMSKTQXGSFAFA

SEQ ID NO: 4044 - protein, 16 aa, Artificial Sequence
  source: /note="Description of Artificial Sequence: Synthetic peptide"
  MOD_RES (6)..(6): Citrulline
MSKTQXGSFAFADKGP

SEQ ID NO: 4045 - protein, 16 aa, Artificial Sequence
  source: /note="Description of Artificial Sequence: Synthetic peptide"
  MOD_RES (8)..(8): Citrulline
IFPQEEQXGSLQDSVM

SEQ ID NO: 4046 - protein, 16 aa, Artificial Sequence
  source: /note="Description of Artificial Sequence: Synthetic peptide"
  MOD_RES (4)..(4): Citrulline
EEQXGSLQDSVMNLTQ

SEQ ID NO: 4047 - protein, 16 aa, Artificial Sequence
  source: /note="Description of Artificial Sequence: Synthetic peptide"
  MOD_RES (8)..(8): Citrulline
YKNLMVSXGAPKPSSL

SEQ ID NO: 4048 - protein, 16 aa, Artificial Sequence
  source: /note="Description of Artificial Sequence: Synthetic peptide"
  MOD_RES (4)..(4): Citrulline
MVSXGAPKPSSLAQKE

SEQ ID NO: 4049 - protein, 16 aa, Artificial Sequence
  source: /note="Description of Artificial Sequence: Synthetic peptide"
  MOD_RES (12)..(12): Citrulline
  MOD_RES (14)..(14): Citrulline
IYNIGIDVKKGXGXYI

SEQ ID NO: 4050 - protein, 16 aa, Artificial Sequence
  source: /note="Description of Artificial Sequence: Synthetic peptide"
  MOD_RES (8)..(8): Citrulline
  MOD_RES (10)..(10): Citrulline
GIDVKKGXGXYIDTCM

SEQ ID NO: 4051 - protein, 16 aa, Artificial Sequence
  source: /note="Description of Artificial Sequence: Synthetic peptide"
  MOD_RES (12)..(12): Citrulline
SAEKTDSSYFYXGDDQ

SEQ ID NO: 4052 - protein, 16 aa, Artificial Sequence
  source: /note="Description of Artificial Sequence: Synthetic peptide"
  MOD_RES (8)..(8): Citrulline
TDSSYFYXGDDQGKNL

SEQ ID NO: 4053 - protein, 16 aa, Artificial Sequence
  source: /note="Description of Artificial Sequence: Synthetic peptide"
  MOD_RES (6)..(6): Citrulline
  MOD_RES (12)..(12): Citrulline
YECNEXGINFSXKSPL

SEQ ID NO: 4054 - protein, 16 aa, Artificial Sequence
  source: /note="Description of Artificial Sequence: Synthetic peptide"
  MOD_RES (2)..(2): Citrulline
  MOD_RES (8)..(8): Citrulline
EXGINFSXKSPLTQSQ

SEQ ID NO: 4055 - protein, 16 aa, Artificial Sequence
  source: /note="Description of Artificial Sequence: Synthetic peptide"
  MOD_RES (7)..(7): Citrulline
  MOD_RES (12)..(12): Citrulline
ALGAGSXAGGVXGGPV

SEQ ID NO: 4056 - protein, 16 aa, Artificial Sequence
  source: /note="Description of Artificial Sequence: Synthetic peptide"
  MOD_RES (3)..(3): Citrulline
  MOD_RES (8)..(8): Citrulline
GSXAGGVXGGPVGCSE

SEQ ID NO: 4057 - protein, 16 aa, Artificial Sequence
  source: /note="Description of Artificial Sequence: Synthetic peptide"
  MOD_RES (9)..(9): Citrulline
  MOD_RES (11)..(11): Citrulline
EIDDSANFXKXGSLLW

SEQ ID NO: 4058 - protein, 16 aa, Artificial Sequence
  source: /note="Description of Artificial Sequence: Synthetic peptide"
  MOD_RES (5)..(5): Citrulline
  MOD_RES (7)..(7): Citrulline
SANFXKXGSLLWNQQD

SEQ ID NO: 4059 - protein, 16 aa, Artificial Sequence
  source: /note="Description of Artificial Sequence: Synthetic peptide"
  MOD_RES (6)..(6): Citrulline
QKVHLXGATALEMGMP

SEQ ID NO: 4060 - protein, 16 aa, Artificial Sequence
  source: /note="Description of Artificial Sequence: Synthetic peptide"
  MOD_RES (8)..(8): Citrulline
  MOD_RES (12)..(12): Citrulline
PSTSILKXGLKXSQED

SEQ ID NO: 4061 - protein, 16 aa, Artificial Sequence
  source: /note="Description of Artificial Sequence: Synthetic peptide"
  MOD_RES (9)..(9): Citrulline
  MOD_RES (12)..(12): Citrulline
AGLYECVSXGGXIAYQ

SEQ ID NO: 4062 - protein, 16 aa, Artificial Sequence
  source: /note="Description of Artificial Sequence: Synthetic peptide"
  MOD_RES (5)..(5): Citrulline
  MOD_RES (8)..(8): Citrulline
ECVSXGGXIAYQLSVQ

SEQ ID NO: 4063 - protein, 16 aa, Artificial Sequence
  source: /note="Description of Artificial Sequence: Synthetic peptide"
  MOD_RES (10)..(10): Citrulline
EGTMAMLVIXGASLKD

SEQ ID NO: 4064 - protein, 16 aa, Artificial Sequence
  source: /note="Description of Artificial Sequence: Synthetic peptide"
  MOD_RES (6)..(6): Citrulline
AMLVIXGASLKDAGEY

SEQ ID NO: 4065 - protein, 16 aa, Artificial Sequence
  source: /note="Description of Artificial Sequence: Synthetic peptide"
  MOD_RES (12)..(12): Citrulline
  MOD_RES (16)..(16): Citrulline
PVCWTKDGKTLXGSAX

SEQ ID NO: 4066 - protein, 16 aa, Artificial Sequence
  source: /note="Description of Artificial Sequence: Synthetic peptide"
  MOD_RES (8)..(8): Citrulline
  MOD_RES (12)..(12): Citrulline
TKDGKTLXGSAXCQLS

SEQ ID NO: 4067 - protein, 16 aa, Artificial Sequence
  source: /note="Description of Artificial Sequence: Synthetic peptide"
  MOD_RES (11)..(11): Citrulline
GDLTGPGPCPXGAPAL

SEQ ID NO: 4068 - protein, 16 aa, Artificial Sequence
  source: /note="Description of Artificial Sequence: Synthetic peptide"
  MOD_RES (7)..(7): Citrulline
GPGPCPXGAPALQETG

SEQ ID NO: 4069 - protein, 16 aa, Artificial Sequence
  source: /note="Description of Artificial Sequence: Synthetic peptide"
  MOD_RES (7)..(7): Citrulline
  MOD_RES (9)..(9): Citrulline
QLSDVEXVXGISLAQQ

SEQ ID NO: 4070 - protein, 16 aa, Artificial Sequence
  source: /note="Description of Artificial Sequence: Synthetic peptide"
  MOD_RES (3)..(3): Citrulline
  MOD_RES (5)..(5): Citrulline
VEXVXGISLAQQESVS

SEQ ID NO: 4071 - protein, 16 aa, Artificial Sequence
  source: /note="Description of Artificial Sequence: Synthetic peptide"
  MOD_RES (8)..(9): Citrulline
THLLYNPXXGDIKLTQ

SEQ ID NO: 4072 - protein, 16 aa, Artificial Sequence
  source: /note="Description of Artificial Sequence: Synthetic peptide"
  MOD_RES (4)..(5): Citrulline
YNPXXGDIKLTQLAML

SEQ ID NO: 4073 - protein, 16 aa, Artificial Sequence
  source: /note="Description of Artificial Sequence: Synthetic peptide"
  MOD_RES (11)..(11): Citrulline
  MOD_RES (14)..(14): Citrulline
GKVSGQEQSSXGQXIL

SEQ ID NO: 4074 - protein, 16 aa, Artificial Sequence
  source: /note="Description of Artificial Sequence: Synthetic peptide"
  MOD_RES (7)..(7): Citrulline
  MOD_RES (10)..(10): Citrulline
GQEQSSXGQXILSIPI

SEQ ID NO: 4075 - protein, 16 aa, Artificial Sequence
  source: /note="Description of Artificial Sequence: Synthetic peptide"
  MOD_RES (10)..(10): Citrulline
  MOD_RES (14)..(14): Citrulline
PQTGPWPSTXGFSXKE

SEQ ID NO: 4076 - protein, 16 aa, Artificial Sequence
  source: /note="Description of Artificial Sequence: Synthetic peptide"
  MOD_RES (6)..(6): Citrulline
  MOD_RES (10)..(10): Citrulline
PWPSTXGFSXKESLLQ

SEQ ID NO: 4077 - protein, 16 aa, Artificial Sequence
  source: /note="Description of Artificial Sequence: Synthetic peptide"
  MOD_RES (8)..(8): Citrulline
EIVWSPVXGAELYETK

SEQ ID NO: 4078 - protein, 16 aa, Artificial Sequence
  source: /note="Description of Artificial Sequence: Synthetic peptide"
  MOD_RES (4)..(4): Citrulline
SPVXGAELYETKAVDG

SEQ ID NO: 4079 - protein, 16 aa, Artificial Sequence
  source: /note="Description of Artificial Sequence: Synthetic peptide"
  MOD_RES (5)..(5): Citrulline
  MOD_RES (12)..(12): Citrulline
PNGIXIYWQASXGSAN

SEQ ID NO: 4080 - protein, 16 aa, Artificial Sequence
  source: /note="Description of Artificial Sequence: Synthetic peptide"
  MOD_RES (1)..(1): Citrulline
  MOD_RES (8)..(8): Citrulline
XIYWQASXGSANYSTD

SEQ ID NO: 4081 - protein, 16 aa, Artificial Sequence
  source: /note="Description of Artificial Sequence: Synthetic peptide"
  MOD_RES (4)..(4): Citrulline
QASXGSANYSTDLYGS

SEQ ID NO: 4082 - protein, 16 aa, Artificial Sequence
  source: /note="Description of Artificial Sequence: Synthetic peptide"
  MOD_RES (7)..(7): Citrulline
  MOD_RES (9)..(9): Citrulline
DTQQAPXQXGASTVSS

SEQ ID NO: 4083 - protein, 16 aa, Artificial Sequence
  source: /note="Description of Artificial Sequence: Synthetic peptide"
  MOD_RES (10)..(10): Citrulline
VESFSSLLSXGSLEQL

SEQ ID NO: 4084 - protein, 16 aa, Artificial Sequence
  source: /note="Description of Artificial Sequence: Synthetic peptide"
  MOD_RES (6)..(6): Citrulline
SSLLSXGSLEQLSEEE

SEQ ID NO: 4085 - protein, 16 aa, Artificial Sequence
  source: /note="Description of Artificial Sequence: Synthetic peptide"
  MOD_RES (2)..(2): Citrulline
SXGSLEQLSEEEMHAE

SEQ ID NO: 4086 - protein, 16 aa, Artificial Sequence
  source: /note="Description of Artificial Sequence: Synthetic peptide"
  MOD_RES (12)..(12): Citrulline
CCCGGSGAGGAXGAFG

SEQ ID NO: 4087 - protein, 16 aa, Artificial Sequence
  source: /note="Description of Artificial Sequence: Synthetic peptide"
  MOD_RES (8)..(8): Citrulline
GSGAGGAXGAFGYGNG

SEQ ID NO: 4088 - protein, 16 aa, Artificial Sequence
  source: /note="Description of Artificial Sequence: Synthetic peptide"
  MOD_RES (4)..(4): Citrulline
GGAXGAFGYGNGGGVG

SEQ ID NO: 4089 - protein, 16 aa, Artificial Sequence
  source: /note="Description of Artificial Sequence: Synthetic peptide"
  MOD_RES (9)..(9): Citrulline
  MOD_RES (12)..(12): Citrulline
APGCKASGXGSXVTHL

SEQ ID NO: 4090 - protein, 16 aa, Artificial Sequence
  source: /note="Description of Artificial Sequence: Synthetic peptide"
  MOD_RES (10)..(11): Citrulline
MEGLCSEQGXXGSTLA

SEQ ID NO: 4091 - protein, 16 aa, Artificial Sequence
  source: /note="Description of Artificial Sequence: Synthetic peptide"
  MOD_RES (6)..(7): Citrulline
CSEQGXXGSTLASSSE

SEQ ID NO: 4092 - protein, 16 aa, Artificial Sequence
  source: /note="Description of Artificial Sequence: Synthetic peptide"
  MOD_RES (5)..(5): Citrulline
  MOD_RES (7)..(7): Citrulline
TSTAXGXGSTSNFYSQ

SEQ ID NO: 4093 - protein, 16 aa, Artificial Sequence
  source: /note="Description of Artificial Sequence: Synthetic peptide"
  MOD_RES (1)..(1): Citrulline
  MOD_RES (3)..(3): Citrulline
XGXGSTSNFYSQGLES

SEQ ID NO: 4094 - protein, 16 aa, Artificial Sequence
  source: /note="Description of Artificial Sequence: Synthetic peptide"
  MOD_RES (9)..(9): Citrulline
  MOD_RES (12)..(12): Citrulline
DMNEPKSAXKGXGDAL

SEQ ID NO: 4095 - protein, 16 aa, Artificial Sequence
  source: /note="Description of Artificial Sequence: Synthetic peptide"
  MOD_RES (5)..(5): Citrulline
  MOD_RES (8)..(8): Citrulline
PKSAXKGXGDALSLQQ

SEQ ID NO: 4096 - protein, 16 aa, Artificial Sequence
  source: /note="Description of Artificial Sequence: Synthetic peptide"
  MOD_RES (1)..(1): Citrulline
  MOD_RES (4)..(4): Citrulline
XKGXGDALSLQQNYPP

SEQ ID NO: 4097 - protein, 16 aa, Artificial Sequence
  source: /note="Description of Artificial Sequence: Synthetic peptide"
  MOD_RES (9)..(9): Citrulline
LVLFDKPTXGTSIKEF

SEQ ID NO: 4098 - protein, 16 aa, Artificial Sequence
  source: /note="Description of Artificial Sequence: Synthetic peptide"
  MOD_RES (5)..(5): Citrulline
  MOD_RES (13)..(13): Citrulline
DKPTXGTSIKEFXEMT

SEQ ID NO: 4099 - protein, 16 aa, Artificial Sequence
  source: /note="Description of Artificial Sequence: Synthetic peptide"
  MOD_RES (4)..(4): Citrulline
  MOD_RES (10)..(10): Citrulline
FCFXNTSFSXGFTKNM

SEQ ID NO: 4100 - protein, 16 aa, Artificial Sequence
  source: /note="Description of Artificial Sequence: Synthetic peptide"
  MOD_RES (6)..(6): Citrulline
NTSFSXGFTKNMKLEA

SEQ ID NO: 4101 - protein, 16 aa, Artificial Sequence
  source: /note="Description of Artificial Sequence: Synthetic peptide"
  MOD_RES (8)..(8): Citrulline
  MOD_RES (12)..(12): Citrulline
GPENIPEXFKEXGYQL

SEQ ID NO: 4102 - protein, 16 aa, Artificial Sequence
  source: /note="Description of Artificial Sequence: Synthetic peptide"
  MOD_RES (4)..(4): Citrulline
  MOD_RES (8)..(8): Citrulline
IPEXFKEXGYQLKPHE

SEQ ID NO: 4103 - protein, 16 aa, Artificial Sequence
  source: /note="Description of Artificial Sequence: Synthetic peptide"
  MOD_RES (8)..(8): Citrulline
  MOD_RES (15)..(15): Citrulline
PDPGGGAXGSGWGSXS

SEQ ID NO: 4104 - protein, 16 aa, Artificial Sequence
  source: /note="Description of Artificial Sequence: Synthetic peptide"
  MOD_RES (4)..(4): Citrulline
  MOD_RES (11)..(11): Citrulline
GGAXGSGWGSXSQAPY

SEQ ID NO: 4105 - protein, 16 aa, Artificial Sequence
  source: /note="Description of Artificial Sequence: Synthetic peptide"
  MOD_RES (10)..(10): Citrulline
PLGPSTGSSXGSGVEM

SEQ ID NO: 4106 - protein, 16 aa, Artificial Sequence
  source: /note="Description of Artificial Sequence: Synthetic peptide"
  MOD_RES (6)..(6): Citrulline
STGSSXGSGVEMSLPD

SEQ ID NO: 4107 - protein, 16 aa, Artificial Sequence
  source: /note="Description of Artificial Sequence: Synthetic peptide"
  MOD_RES (2)..(2): Citrulline
  MOD_RES (4)..(4): Citrulline
LXGXADPNLNAVKIEK

SEQ ID NO: 4108 - protein, 16 aa, Artificial Sequence
  source: /note="Description of Artificial Sequence: Synthetic peptide"
  MOD_RES (13)..(13): Citrulline
SDSQEALFSKSSXGCL

SEQ ID NO: 4109 - protein, 16 aa, Artificial Sequence
  source: /note="Description of Artificial Sequence: Synthetic peptide"
  MOD_RES (9)..(9): Citrulline
EALFSKSSXGCLQNEK

SEQ ID NO: 4110 - protein, 16 aa, Artificial Sequence
  source: /note="Description of Artificial Sequence: Synthetic peptide"
  MOD_RES (8)..(8): Citrulline
  MOD_RES (15)..(15): Citrulline
SSPAFTKXGASSYVXE

SEQ ID NO: 4111 - protein, 16 aa, Artificial Sequence
  source: /note="Description of Artificial Sequence: Synthetic peptide"
  MOD_RES (4)..(4): Citrulline
  MOD_RES (11)..(11): Citrulline
FTKXGASSYVXETLPV

SEQ ID NO: 4112 - protein, 16 aa, Artificial Sequence
  source: /note="Description of Artificial Sequence: Synthetic peptide"
  MOD_RES (10)..(10): Citrulline
ITLKGWTGYXGGLDTK

SEQ ID NO: 4113 - protein, 16 aa, Artificial Sequence
  source: /note="Description of Artificial Sequence: Synthetic peptide"
  MOD_RES (6)..(6): Citrulline
GWTGYXGGLDTKNDTT

SEQ ID NO: 4114 - protein, 16 aa, Artificial Sequence
  source: /note="Description of Artificial Sequence: Synthetic peptide"
  MOD_RES (2)..(2): Citrulline
  MOD_RES (12)..(12): Citrulline
PXLDLEDSYTLXGSYT

SEQ ID NO: 4115 - protein, 16 aa, Artificial Sequence
  source: /note="Description of Artificial Sequence: Synthetic peptide"
  MOD_RES (8)..(8): Citrulline
  MOD_RES (13)..(13): Citrulline
LEDSYTLXGSYTXKKD

SEQ ID NO: 4116 - protein, 16 aa, Artificial Sequence
  source: /note="Description of Artificial Sequence: Synthetic peptide"
  MOD_RES (4)..(4): Citrulline
  MOD_RES (9)..(9): Citrulline
YTLXGSYTXKKDVPTD

SEQ ID NO: 4117 - protein, 16 aa, Artificial Sequence
  source: /note="Description of Artificial Sequence: Synthetic peptide"
  MOD_RES (8)..(8): Citrulline
  MOD_RES (10)..(10): Citrulline
IAPTAPSXGXGGAIPP

SEQ ID NO: 4118 - protein, 15 aa, Artificial Sequence
  source: /note="Description of Artificial Sequence: Synthetic peptide"
  MOD_RES (4)..(4): Citrulline
  MOD_RES (6)..(6): Citrulline
APSXGXGGAIPPPPP

SEQ ID NO: 4119 - protein, 16 aa, Artificial Sequence
  source: /note="Description of Artificial Sequence: Synthetic peptide"
  MOD_RES (2)..(2): Citrulline
  MOD_RES (14)..(14): Citrulline
GXGGAIPPPPPPGXGV

SEQ ID NO: 4120 - protein, 16 aa, Artificial Sequence
  source: /note="Description of Artificial Sequence: Synthetic peptide"
  MOD_RES (10)..(10): Citrulline
  MOD_RES (16)..(16): Citrulline
AIPPPPPPGXGVLTPX

SEQ ID NO: 4121 - protein, 16 aa, Artificial Sequence
  source: /note="Description of Artificial Sequence: Synthetic peptide"
  MOD_RES (6)..(6): Citrulline
  MOD_RES (12)..(12): Citrulline
PPPPGXGVLTPXGSTV

SEQ ID NO: 4122 - protein, 16 aa, Artificial Sequence
  source: /note="Description of Artificial Sequence: Synthetic peptide"
  MOD_RES (4)..(4): Citrulline
  MOD_RES (10)..(10): Citrulline
LTPXGSTVTXGALPVP

SEQ ID NO: 4123 - protein, 16 aa, Artificial Sequence
  source: /note="Description of Artificial Sequence: Synthetic peptide"
  MOD_RES (6)..(6): Citrulline
  MOD_RES (16)..(16): Citrulline
GSTVTXGALPVPPVAX

SEQ ID NO: 4124 - protein, 16 aa, Artificial Sequence
  source: /note="Description of Artificial Sequence: Synthetic peptide"
  MOD_RES (2)..(2): Citrulline
  MOD_RES (12)..(12): Citrulline
TXGALPVPPVAXGVPT

SEQ ID NO: 4125 - protein, 16 aa, Artificial Sequence
  source: /note="Description of Artificial Sequence: Synthetic peptide"
  MOD_RES (8)..(8): Citrulline
  MOD_RES (10)..(10): Citrulline
FPEPECPXGXSALLKG

SEQ ID NO: 4126 - protein, 16 aa, Artificial Sequence
  source: /note="Description of Artificial Sequence: Synthetic peptide"
  MOD_RES (4)..(4): Citrulline
  MOD_RES (6)..(6): Citrulline
ECPXGXSALLKGPPQE

SEQ ID NO: 4127 - protein, 16 aa, Artificial Sequence
  source: /note="Description of Artificial Sequence: Synthetic peptide"
  MOD_RES (11)..(11): Citrulline
  MOD_RES (13)..(13): Citrulline
SSCLALNDLLXGXPLD

SEQ ID NO: 4128 - protein, 16 aa, Artificial Sequence
  source: /note="Description of Artificial Sequence: Synthetic peptide"
  MOD_RES (7)..(7): Citrulline
  MOD_RES (9)..(9): Citrulline
ALNDLLXGXPLDDIID

SEQ ID NO: 4129 - protein, 16 aa, Artificial Sequence
  source: /note="Description of Artificial Sequence: Synthetic peptide"
  MOD_RES (11)..(11): Citrulline
KENCVPVFPGXGSSPS

SEQ ID NO: 4130 - protein, 16 aa, Artificial Sequence
  source: /note="Description of Artificial Sequence: Synthetic peptide"
  MOD_RES (7)..(7): Citrulline
VPVFPGXGSSPSSNSV

SEQ ID NO: 4131 - protein, 16 aa, Artificial Sequence
  source: /note="Description of Artificial Sequence: Synthetic peptide"
  MOD_RES (3)..(3): Citrulline
  MOD_RES (10)..(10): Citrulline
SDXKFSVTSXGSIDDV

SEQ ID NO: 4132 - protein, 16 aa, Artificial Sequence
  source: /note="Description of Artificial Sequence: Synthetic peptide"
  MOD_RES (6)..(6): Citrulline
FSVTSXGSIDDVFNCN

SEQ ID NO: 4133 - protein, 16 aa, Artificial Sequence
  source: /note="Description of Artificial Sequence: Synthetic peptide"
  MOD_RES (13)..(13): Citrulline
VFTKMCDIGDASXGSL

SEQ ID NO: 4134 - protein, 16 aa, Artificial Sequence
  source: /note="Description of Artificial Sequence: Synthetic peptide"
  MOD_RES (9)..(9): Citrulline
MCDIGDASXGSLSSYA

SEQ ID NO: 4135 - protein, 16 aa, Artificial Sequence
  source: /note="Description of Artificial Sequence: Synthetic peptide"
  MOD_RES (11)..(11): Citrulline
  MOD_RES (14)..(14): Citrulline
QPYLEGSTVMXGTXCL

SEQ ID NO: 4136 - protein, 16 aa, Artificial Sequence
  source: /note="Description of Artificial Sequence: Synthetic peptide"
  MOD_RES (7)..(7): Citrulline
  MOD_RES (10)..(10): Citrulline
EGSTVMXGTXCLAEYH

SEQ ID NO: 4137 - protein, 16 aa, Artificial Sequence
  source: /note="Description of Artificial Sequence: Synthetic peptide"
  MOD_RES (12)..(12): Citrulline
LHYPTGEVPFPXGMKG

SEQ ID NO: 4138 - protein, 16 aa, Artificial Sequence
  source: /note="Description of Artificial Sequence: Synthetic peptide"
  MOD_RES (8)..(8): Citrulline
TGEVPFPXGMKGQDFE

SEQ ID NO: 4139 - protein, 16 aa, Artificial Sequence
  source: /note="Description of Artificial Sequence: Synthetic peptide"
  MOD_RES (10)..(11): Citrulline
HHKLADHFSXXGKTLP

SEQ ID NO: 4140 - protein, 16 aa, Artificial Sequence
  source: /note="Description of Artificial Sequence: Synthetic peptide"
  MOD_RES (6)..(7): Citrulline
ADHFSXXGKTLPQQES

SEQ ID NO: 4141 - protein, 16 aa, Artificial Sequence
  source: /note="Description of Artificial Sequence: Synthetic peptide"
  MOD_RES (2)..(3): Citrulline
SXXGKTLPQQESLEIE

SEQ ID NO: 4142 - protein, 16 aa, Artificial Sequence
  source: /note="Description of Artificial Sequence: Synthetic peptide"
  MOD_RES (13)..(13): Citrulline
KVTKMDSKKWSTXGSE

SEQ ID NO: 4143 - protein, 16 aa, Artificial Sequence
  source: /note="Description of Artificial Sequence: Synthetic peptide"
  MOD_RES (9)..(9): Citrulline
MDSKKWSTXGSESHEL

SEQ ID NO: 4144 - protein, 16 aa, Artificial Sequence
  source: /note="Description of Artificial Sequence: Synthetic peptide"
  MOD_RES (5)..(5): Citrulline
KWSTXGSESHELNEGG

SEQ ID NO: 4145 - protein, 16 aa, Artificial Sequence
  source: /note="Description of Artificial Sequence: Synthetic peptide"
  MOD_RES (11)..(11): Citrulline
  MOD_RES (16)..(16): Citrulline
PFQSDWSGSSXGKYTX

SEQ ID NO: 4146 - protein, 16 aa, Artificial Sequence
  source: /note="Description of Artificial Sequence: Synthetic peptide"
  MOD_RES (7)..(7): Citrulline
  MOD_RES (12)..(12): Citrulline
DWSGSSXGKYTXSSLL

SEQ ID NO: 4147 - protein, 16 aa, Artificial Sequence
  source: /note="Description of Artificial Sequence: Synthetic peptide"
  MOD_RES (4)..(4): Citrulline
  MOD_RES (9)..(9): Citrulline
EKLXIYPLXGSQKSSE

SEQ ID NO: 4148 - protein, 16 aa, Artificial Sequence
  source: /note="Description of Artificial Sequence: Synthetic peptide"
  MOD_RES (5)..(5): Citrulline
IYPLXGSQKSSENGHI

SEQ ID NO: 4149 - protein, 16 aa, Artificial Sequence
  source: /note="Description of Artificial Sequence: Synthetic peptide"
  MOD_RES (10)..(10): Citrulline
GSWVKGLISXGASFMP

SEQ ID NO: 4150 - protein, 16 aa, Artificial Sequence
  source: /note="Description of Artificial Sequence: Synthetic peptide"
  MOD_RES (6)..(6): Citrulline
KGLISXGASFMPLCVS

SEQ ID NO: 4151 - protein, 16 aa, Artificial Sequence
  source: /note="Description of Artificial Sequence: Synthetic peptide"
  MOD_RES (8)..(8): Citrulline
  MOD_RES (14)..(14): Citrulline
LDPAKMNXGIFVSXGS

SEQ ID NO: 4152 - protein, 16 aa, Artificial Sequence
  source: /note="Description of Artificial Sequence: Synthetic peptide"
  MOD_RES (4)..(4): Citrulline
  MOD_RES (10)..(10): Citrulline
KMNXGIFVSXGSPNET

SEQ ID NO: 4153 - protein, 16 aa, Artificial Sequence
  source: /note="Description of Artificial Sequence: Synthetic peptide"
  MOD_RES (6)..(6): Citrulline
GIFVSXGSPNETELIE

SEQ ID NO: 4154 - protein, 16 aa, Artificial Sequence
  source: /note="Description of Artificial Sequence: Synthetic peptide"
  MOD_RES (5)..(5): Citrulline
  MOD_RES (11)..(11): Citrulline
VYLVXKLSSQXGMEFV

SEQ ID NO: 4155 - protein, 16 aa, Artificial Sequence
  source: /note="Description of Artificial Sequence: Synthetic peptide"
  MOD_RES (1)..(1): Citrulline
  MOD_RES (7)..(7): Citrulline
XKLSSQXGMEFVQGLS

SEQ ID NO: 4156 - protein, 16 aa, Artificial Sequence
  source: /note="Description of Artificial Sequence: Synthetic peptide"
  MOD_RES (7)..(7): Citrulline
GSLTHTXGPLDGSPYA

SEQ ID NO: 4157 - protein, 16 aa, Artificial Sequence
  source: /note="Description of Artificial Sequence: Synthetic peptide"
  MOD_RES (3)..(3): Citrulline
  MOD_RES (16)..(16): Citrulline
HTXGPLDGSPYAQVQX

SEQ ID NO: 4158 - protein, 16 aa, Artificial Sequence
  source: /note="Description of Artificial Sequence: Synthetic peptide"
  MOD_RES (1)..(1): Citrulline
  MOD_RES (13)..(13): Citrulline
XGFYPQYGALETXGGF

SEQ ID NO: 4159 - protein, 16 aa, Artificial Sequence
  source: /note="Description of Artificial Sequence: Synthetic peptide"
  MOD_RES (9)..(9): Citrulline
  MOD_RES (15)..(15): Citrulline
PQYGALETXGGFNPXV

SEQ ID NO: 4160 - protein, 16 aa, Artificial Sequence
  source: /note="Description of Artificial Sequence: Synthetic peptide"
  MOD_RES (12)..(12): Citrulline
LLAVCTSDFAVXGSIQ

SEQ ID NO: 4161 - protein, 16 aa, Artificial Sequence
  source: /note="Description of Artificial Sequence: Synthetic peptide"
  MOD_RES (8)..(8): Citrulline
CTSDFAVXGSIQQVTH

SEQ ID NO: 4162 - protein, 16 aa, Artificial Sequence
  source: /note="Description of Artificial Sequence: Synthetic peptide"
  MOD_RES (4)..(4): Citrulline
  MOD_RES (10)..(10): Citrulline
TYLXPPHTSXGTSQTP

SEQ ID NO: 4163 - protein, 16 aa, Artificial Sequence
  source: /note="Description of Artificial Sequence: Synthetic peptide"
  MOD_RES (6)..(6): Citrulline
PPHTSXGTSQTPNASS

SEQ ID NO: 4164 - protein, 16 aa, Artificial Sequence
  source: /note="Description of Artificial Sequence: Synthetic peptide"
  MOD_RES (4)..(4): Citrulline
  MOD_RES (12)..(12): Citrulline
LADXSATEMSGXGSVL

SEQ ID NO: 4165 - protein, 16 aa, Artificial Sequence
  source: /note="Description of Artificial Sequence: Synthetic peptide"
  MOD_RES (2)..(2): Citrulline
  MOD_RES (7)..(7): Citrulline
EXDFFLXGKMDEQGFL

SEQ ID NO: 4166 - protein, 16 aa, Artificial Sequence
  source: /note="Description of Artificial Sequence: Synthetic peptide"
  MOD_RES (3)..(3): Citrulline
FLXGKMDEQGFLPISL

SEQ ID NO: 4167 - protein, 16 aa, Artificial Sequence
  source: /note="Description of Artificial Sequence: Synthetic peptide"
  MOD_RES (6)..(6): Citrulline
  MOD_RES (11)..(11): Citrulline
DDYQHXLSIKXGELES

SEQ ID NO: 4168 - protein, 16 aa, Artificial Sequence
  source: /note="Description of Artificial Sequence: Synthetic peptide"
  MOD_RES (2)..(2): Citrulline
  MOD_RES (7)..(7): Citrulline
HXLSIKXGELESAQAQ

SEQ ID NO: 4169 - protein, 16 aa, Artificial Sequence
  source: /note="Description of Artificial Sequence: Synthetic peptide"
  MOD_RES (3)..(3): Citrulline
IKXGELESAQAQIKIL

SEQ ID NO: 4170 - protein, 16 aa, Artificial Sequence
  source: /note="Description of Artificial Sequence: Synthetic peptide"
  MOD_RES (4)..(4): Citrulline
  MOD_RES (12)..(12): Citrulline
SENXCGGNFLKXGSII

SEQ ID NO: 4171 - protein, 16 aa, Artificial Sequence
  source: /note="Description of Artificial Sequence: Synthetic peptide"
  MOD_RES (8)..(8): Citrulline
CGGNFLKXGSIINGAD

SEQ ID NO: 4172 - protein, 16 aa, Artificial Sequence
  source: /note="Description of Artificial Sequence: Synthetic peptide"
  MOD_RES (4)..(4): Citrulline
FLKXGSIINGADWYSF

SEQ ID NO: 4173 - protein, 16 aa, Artificial Sequence
  source: /note="Description of Artificial Sequence: Synthetic peptide"
  MOD_RES (7)..(7): Citrulline
  MOD_RES (16)..(16): Citrulline
INKQATXGDCLAFQMX

SEQ ID NO: 4174 - protein, 16 aa, Artificial Sequence
  source: /note="Description of Artificial Sequence: Synthetic peptide"
  MOD_RES (3)..(3): Citrulline
  MOD_RES (12)..(12): Citrulline
ATXGDCLAFQMXAGLL

SEQ ID NO: 4175 - protein, 16 aa, Artificial Sequence
  source: /note="Description of Artificial Sequence: Synthetic peptide"
  MOD_RES (1)..(1): Citrulline
  MOD_RES (9)..(9): Citrulline
XLPLGKIGXGFSSKDP

SEQ ID NO: 4176 - protein, 16 aa, Artificial Sequence
  source: /note="Description of Artificial Sequence: Synthetic peptide"
  MOD_RES (5)..(5): Citrulline
GKIGXGFSSKDPDFHD

SEQ ID NO: 4177 - protein, 16 aa, Artificial Sequence
  source: /note="Description of Artificial Sequence: Synthetic peptide"
  MOD_RES (7)..(7): Citrulline
QDFKGFXGGLDVTHGQ

SEQ ID NO: 4178 - protein, 16 aa, Artificial Sequence
  source: /note="Description of Artificial Sequence: Synthetic peptide"
  MOD_RES (14)..(14): Citrulline
ISKYGSVQKSFADXGL

SEQ ID NO: 4179 - protein, 16 aa, Artificial Sequence
  source: /note="Description of Artificial Sequence: Synthetic peptide"
  MOD_RES (10)..(10): Citrulline
GSVQKSFADXGLPKPP

SEQ ID NO: 4180 - protein, 16 aa, Artificial Sequence
  source: /note="Description of Artificial Sequence: Synthetic peptide"
  MOD_RES (13)..(13): Citrulline
  MOD_RES (16)..(16): Citrulline
AANILSGACGLQXGDX

SEQ ID NO: 4181 - protein, 16 aa, Artificial Sequence
  source: /note="Description of Artificial Sequence: Synthetic peptide"
  MOD_RES (9)..(9): Citrulline
  MOD_RES (12)..(12): Citrulline
LSGACGLQXGDXVAVM

SEQ ID NO: 4182 - protein, 16 aa, Artificial Sequence
  source: /note="Description of Artificial Sequence: Synthetic peptide"
  MOD_RES (10)..(10): Citrulline
QMQQSSIKSXGDMVAP

SEQ ID NO: 4183 - protein, 16 aa, Artificial Sequence
  source: /note="Description of Artificial Sequence: Synthetic peptide"
  MOD_RES (6)..(6): Citrulline
SSIKSXGDMVAPASPP

SEQ ID NO: 4184 - protein, 16 aa, Artificial Sequence
  source: /note="Description of Artificial Sequence: Synthetic peptide"
  MOD_RES (1)..(1): Citrulline
  MOD_RES (6)..(6): Citrulline
XLLTSXGLEQQMVSQP

SEQ ID NO: 4185 - protein, 16 aa, Artificial Sequence
  source: /note="Description of Artificial Sequence: Synthetic peptide"
  MOD_RES (4)..(4): Citrulline
  MOD_RES (8)..(8): Citrulline
HPEXKSEXGSLGVPKT

SEQ ID NO: 4186 - protein, 16 aa, Artificial Sequence
  source: /note="Description of Artificial Sequence: Synthetic peptide"
  MOD_RES (4)..(4): Citrulline
KSEXGSLGVPKTLAYT

SEQ ID NO: 4187 - protein, 16 aa, Artificial Sequence
  source: /note="Description of Artificial Sequence: Synthetic peptide"
  MOD_RES (6)..(6): Citrulline
AWEPLXGSLQQGQSLA

SEQ ID NO: 4188 - protein, 16 aa, Artificial Sequence
  source: /note="Description of Artificial Sequence: Synthetic peptide"
  MOD_RES (2)..(2): Citrulline
LXGSLQQGQSLAVNLC

SEQ ID NO: 4189 - protein, 16 aa, Artificial Sequence
  source: /note="Description of Artificial Sequence: Synthetic peptide"
  MOD_RES (11)..(11): Citrulline
PSPAGCGGKGXGLLLP

SEQ ID NO: 4190 - protein, 16 aa, Artificial Sequence
  source: /note="Description of Artificial Sequence: Synthetic peptide"
  MOD_RES (7)..(7): Citrulline
GCGGKGXGLLLPAGAA

SEQ ID NO: 4191 - protein, 16 aa, Artificial Sequence
  source: /note="Description of Artificial Sequence: Synthetic peptide"
  MOD_RES (3)..(3): Citrulline
KGXGLLLPAGAAPGQQ

SEQ ID NO: 4192 - protein, 16 aa, Artificial Sequence
  source: /note="Description of Artificial Sequence: Synthetic peptide"
  MOD_RES (4)..(4): Citrulline
  MOD_RES (10)..(10): Citrulline
HENXLPTYFXGYESPT

SEQ ID NO: 4193 - protein, 16 aa, Artificial Sequence
  source: /note="Description of Artificial Sequence: Synthetic peptide"
  MOD_RES (6)..(6): Citrulline
LPTYFXGYESPTLSKD

SEQ ID NO: 4194 - protein, 16 aa, Artificial Sequence
  source: /note="Description of Artificial Sequence: Synthetic peptide"
  MOD_RES (8)..(8): Citrulline
LASALQVXGEALSEEE

SEQ ID NO: 4195 - protein, 16 aa, Artificial Sequence
  source: /note="Description of Artificial Sequence: Synthetic peptide"
  MOD_RES (4)..(4): Citrulline
LQVXGEALSEEEIWSL

SEQ ID NO: 4196 - protein, 16 aa, Artificial Sequence
  source: /note="Description of Artificial Sequence: Synthetic peptide"
  MOD_RES (6)..(6): Citrulline
  MOD_RES (8)..(8): Citrulline
MEAFLXGXQNEKSGYQ

SEQ ID NO: 4197 - protein, 16 aa, Artificial Sequence
  source: /note="Description of Artificial Sequence: Synthetic peptide"
  MOD_RES (2)..(2): Citrulline
  MOD_RES (4)..(4): Citrulline
LXGXQNEKSGYQKLLE

SEQ ID NO: 4198 - protein, 16 aa, Artificial Sequence
  source: /note="Description of Artificial Sequence: Synthetic peptide"
  MOD_RES (3)..(3): Citrulline
  MOD_RES (14)..(14): Citrulline
GTXGSSWSAQNTPXGN

SEQ ID NO: 4199 - protein, 16 aa, Artificial Sequence
  source: /note="Description of Artificial Sequence: Synthetic peptide"
  MOD_RES (10)..(10): Citrulline
SSWSAQNTPXGNYNES

SEQ ID NO: 4200 - protein, 16 aa, Artificial Sequence
  source: /note="Description of Artificial Sequence: Synthetic peptide"
  MOD_RES (6)..(6): Citrulline
  MOD_RES (13)..(13): Citrulline
AQNTPXGNYNESXGGQ

SEQ ID NO: 4201 - protein, 16 aa, Artificial Sequence
  source: /note="Description of Artificial Sequence: Synthetic peptide"
  MOD_RES (2)..(2): Citrulline
  MOD_RES (9)..(9): Citrulline
PXGNYNESXGGQSNFN

SEQ ID NO: 4202 - protein, 16 aa, Artificial Sequence
  source: /note="Description of Artificial Sequence: Synthetic peptide"
  MOD_RES (5)..(5): Citrulline
  MOD_RES (13)..(13): Citrulline
YNESXGGQSNFNXGPL

SEQ ID NO: 4203 - protein, 16 aa, Artificial Sequence
  source: /note="Description of Artificial Sequence: Synthetic peptide"
  MOD_RES (13)..(13): Citrulline
SWASANSGSGGSXGKF

SEQ ID NO: 4204 - protein, 16 aa, Artificial Sequence
  source: /note="Description of Artificial Sequence: Synthetic peptide"
  MOD_RES (9)..(9): Citrulline
ANSGSGGSXGKFVSGG

SEQ ID NO: 4205 - protein, 16 aa, Artificial Sequence
  source: /note="Description of Artificial Sequence: Synthetic peptide"
  MOD_RES (5)..(5): Citrulline
  MOD_RES (15)..(15): Citrulline
SGGSXGKFVSGGSGXG

SEQ ID NO: 4206 - protein, 16 aa, Artificial Sequence
  source: /note="Description of Artificial Sequence: Synthetic peptide"
  MOD_RES (9)..(9): Citrulline
TIPEIPPKXGELKTEL

SEQ ID NO: 4207 - protein, 16 aa, Artificial Sequence
  source: /note="Description of Artificial Sequence: Synthetic peptide"
  MOD_RES (5)..(5): Citrulline
IPPKXGELKTELLGLK

SEQ ID NO: 4208 - protein, 16 aa, Artificial Sequence
  source: /note="Description of Artificial Sequence: Synthetic peptide"
  MOD_RES (8)..(8): Citrulline
  MOD_RES (10)..(10): Citrulline
LDSLSSTXGXGQQQLP

SEQ ID NO: 4209 - protein, 16 aa, Artificial Sequence
  source: /note="Description of Artificial Sequence: Synthetic peptide"
  MOD_RES (4)..(4): Citrulline
  MOD_RES (6)..(6): Citrulline
SSTXGXGQQQLPQFLS

SEQ ID NO: 4210 - protein, 16 aa, Artificial Sequence
  source: /note="Description of Artificial Sequence: Synthetic peptide"
  MOD_RES (10)..(10): Citrulline
  MOD_RES (15)..(15): Citrulline
HKGFSIEPSXGSVEXG

SEQ ID NO: 4211 - protein, 16 aa, Artificial Sequence
  source: /note="Description of Artificial Sequence: Synthetic peptide"
  MOD_RES (6)..(6): Citrulline
  MOD_RES (11)..(11): Citrulline
SIEPSXGSVEXGQTKT

SEQ ID NO: 4212 - protein, 16 aa, Artificial Sequence
  source: /note="Description of Artificial Sequence: Synthetic peptide"
  MOD_RES (2)..(2): Citrulline
  MOD_RES (7)..(7): Citrulline
SXGSVEXGQTKTISIS

SEQ ID NO: 4213 - protein, 16 aa, Artificial Sequence
  source: /note="Description of Artificial Sequence: Synthetic peptide"
  MOD_RES (9)..(9): Citrulline
VKTEGAPAXGTVTKEP

SEQ ID NO: 4214 - protein, 16 aa, Artificial Sequence
  source: /note="Description of Artificial Sequence: Synthetic peptide"
  MOD_RES (5)..(5): Citrulline
GAPAXGTVTKEPCKTP

SEQ ID NO: 4215 - protein, 16 aa, Artificial Sequence
  source: /note="Description of Artificial Sequence: Synthetic peptide"
  MOD_RES (14)..(14): Citrulline
MSSGSSLGSLASSXGS

SEQ ID NO: 4216 - protein, 16 aa, Artificial Sequence
  source: /note="Description of Artificial Sequence: Synthetic peptide"
  MOD_RES (10)..(10): Citrulline
SSLGSLASSXGSLNTS

SEQ ID NO: 4217 - protein, 16 aa, Artificial Sequence
  source: /note="Description of Artificial Sequence: Synthetic peptide"
  MOD_RES (6)..(6): Citrulline
  MOD_RES (14)..(14): Citrulline
SLASSXGSLNTSSXGS

SEQ ID NO: 4218 - protein, 16 aa, Artificial Sequence
  source: /note="Description of Artificial Sequence: Synthetic peptide"
  MOD_RES (2)..(2): Citrulline
  MOD_RES (10)..(10): Citrulline
SXGSLNTSSXGSLNSL

SEQ ID NO: 4219 - protein, 16 aa, Artificial Sequence
  source: /note="Description of Artificial Sequence: Synthetic peptide"
  MOD_RES (6)..(6): Citrulline
LNTSSXGSLNSLSSTE

SEQ ID NO: 4220 - protein, 16 aa, Artificial Sequence
  source: /note="Description of Artificial Sequence: Synthetic peptide"
  MOD_RES (2)..(2): Citrulline
  MOD_RES (8)..(8): Citrulline
LXNVTILXGAPGPPGP

SEQ ID NO: 4221 - protein, 16 aa, Artificial Sequence
  source: /note="Description of Artificial Sequence: Synthetic peptide"
  MOD_RES (4)..(4): Citrulline
  MOD_RES (13)..(13): Citrulline
TILXGAPGPPGPXGFK

SEQ ID NO: 4222 - protein, 16 aa, Artificial Sequence
  source: /note="Description of Artificial Sequence: Synthetic peptide"
  MOD_RES (9)..(9): Citrulline
GAPGPPGPXGFKGDMG

SEQ ID NO: 4223 - protein, 16 aa, Artificial Sequence
  source: /note="Description of Artificial Sequence: Synthetic peptide"
  MOD_RES (6)..(6): Citrulline
  MOD_RES (12)..(12): Citrulline
GPVGEXGPVGPXGFPG

SEQ ID NO: 4224 - protein, 16 aa, Artificial Sequence
  source: /note="Description of Artificial Sequence: Synthetic peptide"
  MOD_RES (2)..(2): Citrulline
  MOD_RES (8)..(8): Citrulline
EXGPVGPXGFPGLKGS

SEQ ID NO: 4225 - protein, 16 aa, Artificial Sequence
  source: /note="Description of Artificial Sequence: Synthetic peptide"
  MOD_RES (8)..(8): Citrulline
  MOD_RES (12)..(12): Citrulline
VQTPGVYXCQTXGAPV

SEQ ID NO: 4226 - protein, 16 aa, Artificial Sequence
  source: /note="Description of Artificial Sequence: Synthetic peptide"
  MOD_RES (4)..(4): Citrulline
  MOD_RES (8)..(8): Citrulline
GVYXCQTXGAPVSDPI

SEQ ID NO: 4227 - protein, 16 aa, Artificial Sequence
  source: /note="Description of Artificial Sequence: Synthetic peptide"
  MOD_RES (4)..(4): Citrulline
CQTXGAPVSDPIHLSV

SEQ ID NO: 4228 - protein, 16 aa, Artificial Sequence
  source: /note="Description of Artificial Sequence: Synthetic peptide"
  MOD_RES (10)..(10): Citrulline
AWASTPIPAXGSFVSV

SEQ ID NO: 4229 - protein, 16 aa, Artificial Sequence
  source: /note="Description of Artificial Sequence: Synthetic peptide"
  MOD_RES (6)..(6): Citrulline
TPIPAXGSFVSVENGL

SEQ ID NO: 4230 - protein, 16 aa, Artificial Sequence
  source: /note="Description of Artificial Sequence: Synthetic peptide"
  MOD_RES (7)..(7): Citrulline
  MOD_RES (9)..(9): Citrulline
LAAFYGXLXGDAAAGP

SEQ ID NO: 4231 - protein, 16 aa, Artificial Sequence
  source: /note="Description of Artificial Sequence: Synthetic peptide"
  MOD_RES (3)..(3): Citrulline
  MOD_RES (5)..(5): Citrulline
YGXLXGDAAAGPGPGA

SEQ ID NO: 4232 - protein, 16 aa, Artificial Sequence
  source: /note="Description of Artificial Sequence: Synthetic peptide"
  MOD_RES (9)..(9): Citrulline
LMANLAFIXGQLENAE

SEQ ID NO: 4233 - protein, 16 aa, Artificial Sequence
  source: /note="Description of Artificial Sequence: Synthetic peptide"
  MOD_RES (5)..(5): Citrulline
LAFIXGQLENAEQLFK

SEQ ID NO: 4234 - protein, 16 aa, Artificial Sequence
  source: /note="Description of Artificial Sequence: Synthetic peptide"
  MOD_RES (10)..(10): Citrulline
SMGAATVQSXGQYSCS

SEQ ID NO: 4235 - protein, 16 aa, Artificial Sequence
  source: /note="Description of Artificial Sequence: Synthetic peptide"
  MOD_RES (6)..(6): Citrulline
ATVQSXGQYSCSGQVM

SEQ ID NO: 4236 - protein, 16 aa, Artificial Sequence
  source: /note="Description of Artificial Sequence: Synthetic peptide"
  MOD_RES (7)..(7): Citrulline
NDEKVSXGYLQALATK

SEQ ID NO: 4237 - protein, 16 aa, Artificial Sequence
  source: /note="Description of Artificial Sequence: Synthetic peptide"
  MOD_RES (3)..(3): Citrulline
VSXGYLQALATKMAEE

SEQ ID NO: 4238 - protein, 16 aa, Artificial Sequence
  source: /note="Description of Artificial Sequence: Synthetic peptide"
  MOD_RES (2)..(2): Citrulline
  MOD_RES (9)..(9): Citrulline
IXHGADAVXGSWQGVP

SEQ ID NO: 4239 - protein, 16 aa, Artificial Sequence
  source: /note="Description of Artificial Sequence: Synthetic peptide"
  MOD_RES (5)..(5): Citrulline
ADAVXGSWQGVPGHNG

SEQ ID NO: 4240 - protein, 16 aa, Artificial Sequence
  source: /note="Description of Artificial Sequence: Synthetic peptide"
  MOD_RES (13)..(13): Citrulline
YECNICEKAFSHXGSL

SEQ ID NO: 4241 - protein, 16 aa, Artificial Sequence
  source: /note="Description of Artificial Sequence: Synthetic peptide"
  MOD_RES (9)..(9): Citrulline
ICEKAFSHXGSLTLHQ

SEQ ID NO: 4242 - protein, 16 aa, Artificial Sequence
  source: /note="Description of Artificial Sequence: Synthetic peptide"
  MOD_RES (9)..(9): Citrulline
EIDSFMSSXGKPLPQL

SEQ ID NO: 4243 - protein, 16 aa, Artificial Sequence
  source: /note="Description of Artificial Sequence: Synthetic peptide"
  MOD_RES (5)..(5): Citrulline
FMSSXGKPLPQLSSID

SEQ ID NO: 4244 - protein, 16 aa, Artificial Sequence
  source: /note="Description of Artificial Sequence: Synthetic peptide"
  MOD_RES (7)..(7): Citrulline
  MOD_RES (12)..(12): Citrulline
VQVMLQXIGVSXGSGG

SEQ ID NO: 4245 - protein, 16 aa, Artificial Sequence
  source: /note="Description of Artificial Sequence: Synthetic peptide"
  MOD_RES (3)..(3): Citrulline
  MOD_RES (8)..(8): Citrulline
LQXIGVSXGSGGAEGK

SEQ ID NO: 4246 - protein, 16 aa, Artificial Sequence
  source: /note="Description of Artificial Sequence: Synthetic peptide"
  MOD_RES (13)..(13): Citrulline
LEPGSHSKDGLHXGAL

SEQ ID NO: 4247 - protein, 16 aa, Artificial Sequence
  source: /note="Description of Artificial Sequence: Synthetic peptide"
  MOD_RES (9)..(9): Citrulline
SHSKDGLHXGALLPPP

SEQ ID NO: 4248 - protein, 16 aa, Artificial Sequence
  source: /note="Description of Artificial Sequence: Synthetic peptide"
  MOD_RES (5)..(5): Citrulline
  MOD_RES (14)..(14): Citrulline
DGLHXGALLPPPYXVA

SEQ ID NO: 4249 - protein, 16 aa, Artificial Sequence
  source: /note="Description of Artificial Sequence: Synthetic peptide"
  MOD_RES (2)..(2): Citrulline
  MOD_RES (9)..(9): Citrulline
EXDGIIYGXGTLDDKN

SEQ ID NO: 4250 - protein, 16 aa, Artificial Sequence
  source: /note="Description of Artificial Sequence: Synthetic peptide"
  MOD_RES (5)..(5): Citrulline
IIYGXGTLDDKNSVMA

SEQ ID NO: 4251 - protein, 16 aa, Artificial Sequence
  source: /note="Description of Artificial Sequence: Synthetic peptide"
  MOD_RES (9)..(10): Citrulline
SGNASTMTXXGSSPGS

SEQ ID NO: 4252 - protein, 16 aa, Artificial Sequence
  source: /note="Description of Artificial Sequence: Synthetic peptide"
  MOD_RES (5)..(6): Citrulline
STMTXXGSSPGSLEIP

SEQ ID NO: 4253 - protein, 16 aa, Artificial Sequence
  source: /note="Description of Artificial Sequence: Synthetic peptide"
  MOD_RES (1)..(2): Citrulline
XXGSSPGSLEIPKDLP

SEQ ID NO: 4254 - protein, 16 aa, Artificial Sequence
  source: /note="Description of Artificial Sequence: Synthetic peptide"
  MOD_RES (7)..(7): Citrulline
  MOD_RES (11)..(11): Citrulline
CYDEDSXLLTXGKGAG

SEQ ID NO: 4255 - protein, 16 aa, Artificial Sequence
  source: /note="Description of Artificial Sequence: Synthetic peptide"
  MOD_RES (3)..(3): Citrulline
  MOD_RES (7)..(7): Citrulline
DSXLLTXGKGAGMPNL

SEQ ID NO: 4256 - protein, 16 aa, Artificial Sequence
  source: /note="Description of Artificial Sequence: Synthetic peptide"
  MOD_RES (3)..(3): Citrulline
LTXGKGAGMPNLISTD

SEQ ID NO: 4257 - protein, 16 aa, Artificial Sequence
  source: /note="Description of Artificial Sequence: Synthetic peptide"
  MOD_RES (9)..(9): Citrulline
MNTCVPHPXGAFMLEP

SEQ ID NO: 4258 - protein, 16 aa, Artificial Sequence
  source: /note="Description of Artificial Sequence: Synthetic peptide"
  MOD_RES (5)..(5): Citrulline
VPHPXGAFMLEPEGMS

SEQ ID NO: 4259 - protein, 16 aa, Artificial Sequence
  source: /note="Description of Artificial Sequence: Synthetic peptide"
  MOD_RES (11)..(12): Citrulline
MAVNQSHTENXXGALI

SEQ ID NO: 4260 - protein, 16 aa, Artificial Sequence
  source: /note="Description of Artificial Sequence: Synthetic peptide"
  MOD_RES (7)..(8): Citrulline
QSHTENXXGALIPNGE

SEQ ID NO: 4261 - protein, 16 aa, Artificial Sequence
  source: /note="Description of Artificial Sequence: Synthetic peptide"
  MOD_RES (10)..(10): Citrulline
  MOD_RES (15)..(15): Citrulline
MVKAASAAAXGFPLXT

SEQ ID NO: 4262 - protein, 16 aa, Artificial Sequence
  source: /note="Description of Artificial Sequence: Synthetic peptide"
  MOD_RES (6)..(6): Citrulline
  MOD_RES (11)..(11): Citrulline
ASAAAXGFPLXTLNDW

SEQ ID NO: 4263 - protein, 16 aa, Artificial Sequence
  source: /note="Description of Artificial Sequence: Synthetic peptide"
  MOD_RES (11)..(11): Citrulline
EGGTWLGISTXGKLAA

SEQ ID NO: 4264 - protein, 16 aa, Artificial Sequence
  source: /note="Description of Artificial Sequence: Synthetic peptide"
  MOD_RES (7)..(7): Citrulline
WLGISTXGKLAALTNY

SEQ ID NO: 4265 - protein, 16 aa, Artificial Sequence
  source: /note="Description of Artificial Sequence: Synthetic peptide"
  MOD_RES (3)..(3): Citrulline
STXGKLAALTNYLQPQ

SEQ ID NO: 4266 - protein, 16 aa, Artificial Sequence
  source: /note="Description of Artificial Sequence: Synthetic peptide"
  MOD_RES (10)..(10): Citrulline
  MOD_RES (12)..(12): Citrulline
LQPQLDWQAXGXGELV

SEQ ID NO: 4267 - protein, 16 aa, Artificial Sequence
  source: /note="Description of Artificial Sequence: Synthetic peptide"
  MOD_RES (6)..(6): Citrulline
  MOD_RES (8)..(8): Citrulline
LDWQAXGXGELVTHFL

SEQ ID NO: 4268 - protein, 16 aa, Artificial Sequence
  source: /note="Description of Artificial Sequence: Synthetic peptide"
  MOD_RES (1)..(1): Citrulline
  MOD_RES (13)..(13): Citrulline
XSPGGYKGFDTYXGLP

SEQ ID NO: 4269 - protein, 16 aa, Artificial Sequence
  source: /note="Description of Artificial Sequence: Synthetic peptide"
  MOD_RES (9)..(9): Citrulline
GYKGFDTYXGLPSISN

SEQ ID NO: 4270 - protein, 16 aa, Artificial Sequence
  source: /note="Description of Artificial Sequence: Synthetic peptide"
  MOD_RES (5)..(5): Citrulline
FDTYXGLPSISNGNYS

SEQ ID NO: 4271 - protein, 16 aa, Artificial Sequence
  source: /note="Description of Artificial Sequence: Synthetic peptide"
  MOD_RES (5)..(5): Citrulline
  MOD_RES (14)..(14): Citrulline
PYSQXDNFQQCYKXGG

SEQ ID NO: 4272 - protein, 16 aa, Artificial Sequence
  source: /note="Description of Artificial Sequence: Synthetic peptide"
  MOD_RES (1)..(1): Citrulline
  MOD_RES (10)..(10): Citrulline
XDNFQQCYKXGGTSGG

SEQ ID NO: 4273 - protein, 16 aa, Artificial Sequence
  source: /note="Description of Artificial Sequence: Synthetic peptide"
  MOD_RES (6)..(6): Citrulline
  MOD_RES (14)..(14): Citrulline
QQCYKXGGTSGGPXAN

SEQ ID NO: 4274 - protein, 16 aa, Artificial Sequence
  source: /note="Description of Artificial Sequence: Synthetic peptide"
  MOD_RES (2)..(2): Citrulline
  MOD_RES (11)..(11): Citrulline
TXFTDCSFFVXGQEFK

SEQ ID NO: 4275 - protein, 16 aa, Artificial Sequence
  source: /note="Description of Artificial Sequence: Synthetic peptide"
  MOD_RES (7)..(7): Citrulline
DCSFFVXGQEFKAHKS

SEQ ID NO: 4276 - protein, 16 aa, Artificial Sequence
  source: /note="Description of Artificial Sequence: Synthetic peptide"
  MOD_RES (8)..(8): Citrulline
PNVPVVVXGWLHKQDS

SEQ ID NO: 4277 - protein, 16 aa, Artificial Sequence
  source: /note="Description of Artificial Sequence: Synthetic peptide"
  MOD_RES (4)..(4): Citrulline
  MOD_RES (16)..(16): Citrulline
VVVXGWLHKQDSSGMX

SEQ ID NO: 4278 - protein, 16 aa, Artificial Sequence
  source: /note="Description of Artificial Sequence: Synthetic peptide"
  MOD_RES (1)..(1): Citrulline
  MOD_RES (6)..(6): Citrulline
XLFSVXGLAKEQIDPA

SEQ ID NO: 4279 - protein, 16 aa, Artificial Sequence
  source: /note="Description of Artificial Sequence: Synthetic peptide"
  MOD_RES (2)..(2): Citrulline
VXGLAKEQIDPALFAK

SEQ ID NO: 4280 - protein, 16 aa, Artificial Sequence
  source: /note="Description of Artificial Sequence: Synthetic peptide"
  MOD_RES (10)..(10): Citrulline
LGLIEGYGGXGKGGLP

SEQ ID NO: 4281 - protein, 16 aa, Artificial Sequence
  source: /note="Description of Artificial Sequence: Synthetic peptide"
  MOD_RES (6)..(6): Citrulline
EGYGGXGKGGLPATLS

SEQ ID NO: 4282 - protein, 16 aa, Artificial Sequence
  source: /note="Description of Artificial Sequence: Synthetic peptide"
  MOD_RES (8)..(8): Citrulline
AETVSGTXGSSTGAHI

SEQ ID NO: 4283 - protein, 16 aa, Artificial Sequence
  source: /note="Description of Artificial Sequence: Synthetic peptide"
  MOD_RES (4)..(4): Citrulline
SGTXGSSTGAHISPQF

SEQ ID NO: 4284 - protein, 16 aa, Artificial Sequence
  source: /note="Description of Artificial Sequence: Synthetic peptide"
  MOD_RES (11)..(11): Citrulline
GLGLAYEVYTXGAISS

SEQ ID NO: 4285 - protein, 16 aa, Artificial Sequence
  source: /note="Description of Artificial Sequence: Synthetic peptide"
  MOD_RES (7)..(7): Citrulline
AYEVYTXGAISSTQTI

SEQ ID NO: 4286 - protein, 16 aa, Artificial Sequence
  source: /note="Description of Artificial Sequence: Synthetic peptide"
  MOD_RES (3)..(3): Citrulline
YTXGAISSTQTIPLKW

SEQ ID NO: 4287 - protein, 16 aa, Artificial Sequence
  source: /note="Description of Artificial Sequence: Synthetic peptide"
  MOD_RES (5)..(5): Citrulline
AHTSXGGLVISPESLS

SEQ ID NO: 4288 - protein, 16 aa, Artificial Sequence
  source: /note="Description of Artificial Sequence: Synthetic peptide"
  MOD_RES (12)..(12): Citrulline
  MOD_RES (15)..(15): Citrulline
QAINTCLKDPVXGFXQ

SEQ ID NO: 4289 - protein, 16 aa, Artificial Sequence
  source: /note="Description of Artificial Sequence: Synthetic peptide"
  MOD_RES (8)..(8): Citrulline
  MOD_RES (11)..(11): Citrulline
TCLKDPVXGFXQDESS

SEQ ID NO: 4290 - protein, 16 aa, Artificial Sequence
  source: /note="Description of Artificial Sequence: Synthetic peptide"
  MOD_RES (11)..(11): Citrulline
TQLNVPPLPPXGFPFV

SEQ ID NO: 4291 - protein, 16 aa, Artificial Sequence
  source: /note="Description of Artificial Sequence: Synthetic peptide"
  MOD_RES (7)..(7): Citrulline
  MOD_RES (16)..(16): Citrulline
VPPLPPXGFPFVPPSX

SEQ ID NO: 4292 - protein, 16 aa, Artificial Sequence
  source: /note="Description of Artificial Sequence: Synthetic peptide"
  MOD_RES (1)..(1): Citrulline
  MOD_RES (11)..(11): Citrulline
XVSPDFTQESXGYSKC

SEQ ID NO: 4293 - protein, 16 aa, Artificial Sequence
  source: /note="Description of Artificial Sequence: Synthetic peptide"
  MOD_RES (7)..(7): Citrulline
DFTQESXGYSKCLQNG

SEQ ID NO: 4294 - protein, 16 aa, Artificial Sequence
  source: /note="Description of Artificial Sequence: Synthetic peptide"
  MOD_RES (10)..(10): Citrulline
  MOD_RES (16)..(16): Citrulline
HAASINSLNXGNFTPX

SEQ ID NO: 4295 - protein, 16 aa, Artificial Sequence
  source: /note="Description of Artificial Sequence: Synthetic peptide"
  MOD_RES (6)..(6): Citrulline
  MOD_RES (12)..(12): Citrulline
INSLNXGNFTPXSNPS

SEQ ID NO: 4296 - protein, 16 aa, Artificial Sequence
  source: /note="Description of Artificial Sequence: Synthetic peptide"
  MOD_RES (9)..(9): Citrulline
DGGHACVIXGQVMTSD

SEQ ID NO: 4297 - protein, 16 aa, Artificial Sequence
  source: /note="Description of Artificial Sequence: Synthetic peptide"
  MOD_RES (5)..(5): Citrulline
ACVIXGQVMTSDGTPL

SEQ ID NO: 4298 - protein, 16 aa, Artificial Sequence
  source: /note="Description of Artificial Sequence: Synthetic peptide"
  MOD_RES (6)..(6): Citrulline
  MOD_RES (8)..(8): Citrulline
EDGFLXQXGGDIFEYN

SEQ ID NO: 4299 - protein, 16 aa, Artificial Sequence
  source: /note="Description of Artificial Sequence: Synthetic peptide"
  MOD_RES (2)..(2): Citrulline
  MOD_RES (4)..(4): Citrulline
LXQXGGDIFEYNSAGL

SEQ ID NO: 4300 - protein, 16 aa, Artificial Sequence
  source: /note="Description of Artificial Sequence: Synthetic peptide"
  MOD_RES (3)..(3): Citrulline
  MOD_RES (11)..(11): Citrulline
LNXVNPSSYSXGLKNG

SEQ ID NO: 4301 - protein, 16 aa, Artificial Sequence
  source: /note="Description of Artificial Sequence: Synthetic peptide"
  MOD_RES (7)..(7): Citrulline
  MOD_RES (16)..(16): Citrulline
NPSSYSXGLKNGALSX

SEQ ID NO: 4302 - protein, 16 aa, Artificial Sequence
  source: /note="Description of Artificial Sequence: Synthetic peptide"
  MOD_RES (3)..(3): Citrulline
  MOD_RES (12)..(12): Citrulline
YSXGLKNGALSXGITA

SEQ ID NO: 4303 - protein, 16 aa, Artificial Sequence
  source: /note="Description of Artificial Sequence: Synthetic peptide"
  MOD_RES (7)..(7): Citrulline
  MOD_RES (9)..(9): Citrulline
DYGPILXSXGCVSAKD

SEQ ID NO: 4304 - protein, 16 aa, Artificial Sequence
  source: /note="Description of Artificial Sequence: Synthetic peptide"
  MOD_RES (3)..(3): Citrulline
  MOD_RES (5)..(5): Citrulline
ILXSXGCVSAKDFQQL

SEQ ID NO: 4305 - protein, 16 aa, Artificial Sequence
  source: /note="Description of Artificial Sequence: Synthetic peptide"
  MOD_RES (3)..(3): Citrulline
LPXGIPEQIGALQEVK

SEQ ID NO: 4306 - protein, 16 aa, Artificial Sequence
  source: /note="Description of Artificial Sequence: Synthetic peptide"
  MOD_RES (9)..(9): Citrulline
  MOD_RES (15)..(15): Citrulline
EAVGACAVXGLLAGXV

SEQ ID NO: 4307 - protein, 16 aa, Artificial Sequence
  source: /note="Description of Artificial Sequence: Synthetic peptide"
  MOD_RES (5)..(5): Citrulline
  MOD_RES (11)..(11): Citrulline
ACAVXGLLAGXVPPQG

SEQ ID NO: 4308 - protein, 16 aa, Artificial Sequence
  source: /note="Description of Artificial Sequence: Synthetic peptide"
  MOD_RES (12)..(12): Citrulline
  MOD_RES (15)..(15): Citrulline
VGATCATPPNAXGQXV

SEQ ID NO: 4309 - protein, 16 aa, Artificial Sequence
  source: /note="Description of Artificial Sequence: Synthetic peptide"
  MOD_RES (8)..(8): Citrulline
  MOD_RES (11)..(11): Citrulline
CATPPNAXGQXVKAAA

SEQ ID NO: 4310 - protein, 16 aa, Artificial Sequence
  source: /note="Description of Artificial Sequence: Synthetic peptide"
  MOD_RES (9)..(9): Citrulline
AAGAKTPAXGQPLPTP

SEQ ID NO: 4311 - protein, 16 aa, Artificial Sequence
  source: /note="Description of Artificial Sequence: Synthetic peptide"
  MOD_RES (5)..(5): Citrulline
KTPAXGQPLPTPPAPP

SEQ ID NO: 4312 - protein, 16 aa, Artificial Sequence
  source: /note="Description of Artificial Sequence: Synthetic peptide"
  MOD_RES (9)..(9): Citrulline
ITQKPQPPXGQPKMDW

SEQ ID NO: 4313 - protein, 16 aa, Artificial Sequence
  source: /note="Description of Artificial Sequence: Synthetic peptide"
  MOD_RES (5)..(5): Citrulline
PQPPXGQPKMDWKWPF

SEQ ID NO: 4314 - protein, 16 aa, Artificial Sequence
  source: /note="Description of Artificial Sequence: Synthetic peptide"
  MOD_RES (13)..(13): Citrulline
MEKSALGGGKLPXGSW

SEQ ID NO: 4315 - protein, 16 aa, Artificial Sequence
  source: /note="Description of Artificial Sequence: Synthetic peptide"
  MOD_RES (9)..(9): Citrulline
  MOD_RES (13)..(13): Citrulline
ALGGGKLPXGSWXSSP

SEQ ID NO: 4316 - protein, 16 aa, Artificial Sequence
  source: /note="Description of Artificial Sequence: Synthetic peptide"
  MOD_RES (7)..(7): Citrulline
SVCSGLXGTMQLKNIS

SEQ ID NO: 4317 - protein, 16 aa, Artificial Sequence
  source: /note="Description of Artificial Sequence: Synthetic peptide"
  MOD_RES (3)..(3): Citrulline
GLXGTMQLKNISYGIE

SEQ ID NO: 4318 - protein, 16 aa, Artificial Sequence
  source: /note="Description of Artificial Sequence: Synthetic peptide"
  MOD_RES (12)..(12): Citrulline
  MOD_RES (15)..(15): Citrulline
TFDKQCDDLIGXGSXG

SEQ ID NO: 4319 - protein, 16 aa, Artificial Sequence
  source: /note="Description of Artificial Sequence: Synthetic peptide"
  MOD_RES (8)..(8): Citrulline
  MOD_RES (11)..(11): Citrulline
QCDDLIGXGSXGAPVF

SEQ ID NO: 4320 - protein, 16 aa, Artificial Sequence
  source: /note="Description of Artificial Sequence: Synthetic peptide"
  MOD_RES (4)..(4): Citrulline
  MOD_RES (7)..(7): Citrulline
LIGXGSXGAPVFCYDE

SEQ ID NO: 4321 - protein, 16 aa, Artificial Sequence
  source: /note="Description of Artificial Sequence: Synthetic peptide"
  MOD_RES (3)..(3): Citrulline
  MOD_RES (16)..(16): Citrulline
GSXGAPVFCYDEINTX

SEQ ID NO: 4322 - protein, 16 aa, Artificial Sequence
  source: /note="Description of Artificial Sequence: Synthetic peptide"
  MOD_RES (8)..(8): Citrulline
  MOD_RES (10)..(10): Citrulline
IDDNTVVXAXGLPWQS

SEQ ID NO: 4323 - protein, 16 aa, Artificial Sequence
  source: /note="Description of Artificial Sequence: Synthetic peptide"
  MOD_RES (4)..(4): Citrulline
  MOD_RES (6)..(6): Citrulline
TVVXAXGLPWQSSDQD

SEQ ID NO: 4324 - protein, 16 aa, Artificial Sequence
  source: /note="Description of Artificial Sequence: Synthetic peptide"
  MOD_RES (10)..(10): Citrulline
  MOD_RES (12)..(12): Citrulline
LPTSSVPETXGXNKGS

SEQ ID NO: 4325 - protein, 16 aa, Artificial Sequence
  source: /note="Description of Artificial Sequence: Synthetic peptide"
  MOD_RES (6)..(6): Citrulline
  MOD_RES (8)..(8): Citrulline
SVPETXGXNKGSAALG

SEQ ID NO: 4326 - protein, 16 aa, Artificial Sequence
  source: /note="Description of Artificial Sequence: Synthetic peptide"
  MOD_RES (2)..(2): Citrulline
  MOD_RES (4)..(4): Citrulline
TXGXNKGSAALGGALA

SEQ ID NO: 4327 - protein, 16 aa, Artificial Sequence
  source: /note="Description of Artificial Sequence: Synthetic peptide"
  MOD_RES (5)..(5): Citrulline
  MOD_RES (10)..(10): Citrulline
VKTVXGSLEXQAGQIK

SEQ ID NO: 4328 - protein, 16 aa, Artificial Sequence
  source: /note="Description of Artificial Sequence: Synthetic peptide"
  MOD_RES (1)..(1): Citrulline
  MOD_RES (6)..(6): Citrulline
XGSLEXQAGQIKKLEV

SEQ ID NO: 4329 - protein, 16 aa, Artificial Sequence
  source: /note="Description of Artificial Sequence: Synthetic peptide"
  MOD_RES (10)..(10): Citrulline
  MOD_RES (12)..(12): Citrulline
SGSSPAMETXGXGTSQ

SEQ ID NO: 4330 - protein, 16 aa, Artificial Sequence
  source: /note="Description of Artificial Sequence: Synthetic peptide"
  MOD_RES (6)..(6): Citrulline
  MOD_RES (8)..(8): Citrulline
PAMETXGXGTSQLAEG

SEQ ID NO: 4331 - protein, 16 aa, Artificial Sequence
  source: /note="Description of Artificial Sequence: Synthetic peptide"
  MOD_RES (2)..(2): Citrulline
  MOD_RES (4)..(4): Citrulline
TXGXGTSQLAEGATAK

SEQ ID NO: 4332 - protein, 16 aa, Artificial Sequence
  source: /note="Description of Artificial Sequence: Synthetic peptide"
  MOD_RES (15)..(15): Citrulline
DQNSLSSEQQKYAIXG

SEQ ID NO: 4333 - protein, 16 aa, Artificial Sequence
  source: /note="Description of Artificial Sequence: Synthetic peptide"
  MOD_RES (11)..(11): Citrulline
LSSEQQKYAIXGVPSL

SEQ ID NO: 4334 - protein, 16 aa, Artificial Sequence
  source: /note="Description of Artificial Sequence: Synthetic peptide"
  MOD_RES (13)..(13): Citrulline
VATQTGASATSTXGTS

SEQ ID NO: 4335 - protein, 16 aa, Artificial Sequence
  source: /note="Description of Artificial Sequence: Synthetic peptide"
  MOD_RES (9)..(9): Citrulline
  MOD_RES (15)..(15): Citrulline
TGASATSTXGTSPTXS

SEQ ID NO: 4336 - protein, 16 aa, Artificial Sequence
  source: /note="Description of Artificial Sequence: Synthetic peptide"
  MOD_RES (5)..(5): Citrulline
  MOD_RES (11)..(11): Citrulline
ATSTXGTSPTXSAAPG

SEQ ID NO: 4337 - protein, 16 aa, Artificial Sequence
  source: /note="Description of Artificial Sequence: Synthetic peptide"
  MOD_RES (6)..(6): Citrulline
  MOD_RES (11)..(11): Citrulline
AAPGAXGSPPXPPPPP

SEQ ID NO: 4338 - protein, 16 aa, Artificial Sequence
  source: /note="Description of Artificial Sequence: Synthetic peptide"
  MOD_RES (7)..(7): Citrulline
  MOD_RES (10)..(10): Citrulline
TNTEQDXVSXGTSTVM

SEQ ID NO: 4339 - protein, 16 aa, Artificial Sequence
  source: /note="Description of Artificial Sequence: Synthetic peptide"
  MOD_RES (3)..(3): Citrulline
  MOD_RES (6)..(6): Citrulline
QDXVSXGTSTVMPSAS

SEQ ID NO: 4340 - protein, 16 aa, Artificial Sequence
  source: /note="Description of Artificial Sequence: Synthetic peptide"
  MOD_RES (11)..(11): Citrulline
PNPKACHCKSXGFSLE

SEQ ID NO: 4341 - protein, 16 aa, Artificial Sequence
  source: /note="Description of Artificial Sequence: Synthetic peptide"
  MOD_RES (7)..(7): Citrulline
ACHCKSXGFSLEPKEF

SEQ ID NO: 4342 - protein, 16 aa, Artificial Sequence
  source: /note="Description of Artificial Sequence: Synthetic peptide"
  MOD_RES (9)..(9): Citrulline
DILKQAFVXGLPTPTA

SEQ ID NO: 4343 - protein, 16 aa, Artificial Sequence
  source: /note="Description of Artificial Sequence: Synthetic peptide"
  MOD_RES (5)..(5): Citrulline
  MOD_RES (13)..(13): Citrulline
QAFVXGLPTPTAXFEQ

SEQ ID NO: 4344 - protein, 16 aa, Artificial Sequence
  source: /note="Description of Artificial Sequence: Synthetic peptide"
  MOD_RES (9)..(9): Citrulline
SLSDPSTPXGASPLGP

SEQ ID NO: 4345 - protein, 16 aa, Artificial Sequence
  source: /note="Description of Artificial Sequence: Synthetic peptide"
  MOD_RES (5)..(5): Citrulline
PSTPXGASPLGPGSAA

SEQ ID NO: 4346 - protein, 16 aa, Artificial Sequence
  source: /note="Description of Artificial Sequence: Synthetic peptide"
  MOD_RES (7)..(7): Citrulline
  MOD_RES (11)..(11): Citrulline
PIIASLXKEPXGALLV

SEQ ID NO: 4347 - protein, 16 aa, Artificial Sequence
  source: /note="Description of Artificial Sequence: Synthetic peptide"
  MOD_RES (3)..(3): Citrulline
  MOD_RES (7)..(7): Citrulline
SLXKEPXGALLVKLAG

SEQ ID NO: 4348 - protein, 16 aa, Artificial Sequence
  source: /note="Description of Artificial Sequence: Synthetic peptide"
  MOD_RES (3)..(3): Citrulline
EPXGALLVKLAGVELA

SEQ ID NO: 4349 - protein, 16 aa, Artificial Sequence
  source: /note="Description of Artificial Sequence: Synthetic peptide"
  MOD_RES (11)..(11): Citrulline
YDESVDWNGGXGSPHK

SEQ ID NO: 4350 - protein, 16 aa, Artificial Sequence
  source: /note="Description of Artificial Sequence: Synthetic peptide"
  MOD_RES (7)..(7): Citrulline
VDWNGGXGSPHKEPQF

SEQ ID NO: 4351 - protein, 16 aa, Artificial Sequence
  source: /note="Description of Artificial Sequence: Synthetic peptide"
  MOD_RES (10)..(10): Citrulline
SSGSLQASPXGLLPGL

SEQ ID NO: 4352 - protein, 16 aa, Artificial Sequence
  source: /note="Description of Artificial Sequence: Synthetic peptide"
  MOD_RES (6)..(6): Citrulline
LQASPXGLLPGLLPAP

SEQ ID NO: 4353 - protein, 16 aa, Artificial Sequence
  source: /note="Description of Artificial Sequence: Synthetic peptide"
  MOD_RES (2)..(2): Citrulline
PXGLLPGLLPAPADKL

SEQ ID NO: 4354 - protein, 16 aa, Artificial Sequence
  source: /note="Description of Artificial Sequence: Synthetic peptide"
  MOD_RES (5)..(5): Citrulline
  MOD_RES (9)..(9): Citrulline
ELFDXIMEXGSYTEKD

SEQ ID NO: 4355 - protein, 16 aa, Artificial Sequence
  source: /note="Description of Artificial Sequence: Synthetic peptide"
  MOD_RES (1)..(1): Citrulline
  MOD_RES (5)..(5): Citrulline
XIMEXGSYTEKDASHL

SEQ ID NO: 4356 - protein, 16 aa, Artificial Sequence
  source: /note="Description of Artificial Sequence: Synthetic peptide"
  MOD_RES (6)..(6): Citrulline
IPGTNXGKASGNPSGG

SEQ ID NO: 4357 - protein, 16 aa, Artificial Sequence
  source: /note="Description of Artificial Sequence: Synthetic peptide"
  MOD_RES (11)..(11): Citrulline
GESMCEYFGHXGSKQL

SEQ ID NO: 4358 - protein, 16 aa, Artificial Sequence
  source: /note="Description of Artificial Sequence: Synthetic peptide"
  MOD_RES (7)..(7): Citrulline
  MOD_RES (14)..(14): Citrulline
CEYFGHXGSKQLHXGK

SEQ ID NO: 4359 - protein, 16 aa, Artificial Sequence
  source: /note="Description of Artificial Sequence: Synthetic peptide"
  MOD_RES (9)..(9): Citrulline
AWACPLILXGSLDDTE

SEQ ID NO: 4360 - protein, 16 aa, Artificial Sequence
  source: /note="Description of Artificial Sequence: Synthetic peptide"
  MOD_RES (5)..(5): Citrulline
PLILXGSLDDTEADVL

SEQ ID NO: 4361 - protein, 16 aa, Artificial Sequence
  source: /note="Description of Artificial Sequence: Synthetic peptide"
  MOD_RES (8)..(8): Citrulline
  MOD_RES (12)..(12): Citrulline
MTAAETGXGKPXLGGG

SEQ ID NO: 4362 - protein, 16 aa, Artificial Sequence
  source: /note="Description of Artificial Sequence: Synthetic peptide"
  MOD_RES (4)..(4): Citrulline
  MOD_RES (8)..(8): Citrulline
ETGXGKPXLGGGSGLG

SEQ ID NO: 4363 - protein, 16 aa, Artificial Sequence
  source: /note="Description of Artificial Sequence: Synthetic peptide"
  MOD_RES (4)..(4): Citrulline
  MOD_RES (10)..(10): Citrulline
PNLXTKVWQXGTPSSS

SEQ ID NO: 4364 - protein, 16 aa, Artificial Sequence
  source: /note="Description of Artificial Sequence: Synthetic peptide"
  MOD_RES (6)..(6): Citrulline
TKVWQXGTPSSSPYVS

SEQ ID NO: 4365 - protein, 16 aa, Artificial Sequence
  source: /note="Description of Artificial Sequence: Synthetic peptide"
  MOD_RES (10)..(10): Citrulline
AHENLMEAIXGSSIKQ

SEQ ID NO: 4366 - protein, 16 aa, Artificial Sequence
  source: /note="Description of Artificial Sequence: Synthetic peptide"
  MOD_RES (6)..(6): Citrulline
  MOD_RES (15)..(15): Citrulline
LMEAIXGSSIKQLKXV

SEQ ID NO: 4367 - protein, 16 aa, Artificial Sequence
  source: /note="Description of Artificial Sequence: Synthetic peptide"
  MOD_RES (5)..(5): Citrulline
YLLGXGAAVDCLKKAD

SEQ ID NO: 4368 - protein, 16 aa, Artificial Sequence
  source: /note="Description of Artificial Sequence: Synthetic peptide"
  MOD_RES (1)..(1): Citrulline
XGAAVDCLKKADWTPL

SEQ ID NO: 4369 - protein, 16 aa, Artificial Sequence
  source: /note="Description of Artificial Sequence: Synthetic peptide"
  MOD_RES (13)..(13): Citrulline
LGYWIAAPLPGTXGSG

SEQ ID NO: 4370 - protein, 16 aa, Artificial Sequence
  source: /note="Description of Artificial Sequence: Synthetic peptide"
  MOD_RES (9)..(9): Citrulline
IAAPLPGTXGSGINED

SEQ ID NO: 4371 - protein, 16 aa, Artificial Sequence
  source: /note="Description of Artificial Sequence: Synthetic peptide"
  MOD_RES (5)..(5): Citrulline
LPGTXGSGINEDSKDI

SEQ ID NO: 4372 - protein, 16 aa, Artificial Sequence
  source: /note="Description of Artificial Sequence: Synthetic peptide"
  MOD_RES (9)..(9): Citrulline
  MOD_RES (12)..(12): Citrulline
LPGQKPFKXSLXGSDA

SEQ ID NO: 4373 - protein, 16 aa, Artificial Sequence
  source: /note="Description of Artificial Sequence: Synthetic peptide"
  MOD_RES (5)..(5): Citrulline
  MOD_RES (8)..(8): Citrulline
KPFKXSLXGSDALSET

SEQ ID NO: 4374 - protein, 16 aa, Artificial Sequence
  source: /note="Description of Artificial Sequence: Synthetic peptide"
  MOD_RES (5)..(5): Citrulline
  MOD_RES (14)..(14): Citrulline
DFKQXGFVVGYDTXGQ

SEQ ID NO: 4375 - protein, 16 aa, Artificial Sequence
  source: /note="Description of Artificial Sequence: Synthetic peptide"
  MOD_RES (1)..(1): Citrulline
  MOD_RES (10)..(10): Citrulline
XGFVVGYDTXGQVTSS

SEQ ID NO: 4376 - protein, 16 aa, Artificial Sequence
  source: /note="Description of Artificial Sequence: Synthetic peptide"
  MOD_RES (6)..(6): Citrulline
VGYDTXGQVTSSCSSQ

SEQ ID NO: 4377 - protein, 16 aa, Artificial Sequence
  source: /note="Description of Artificial Sequence: Synthetic peptide"
  MOD_RES (3)..(3): Citrulline
  MOD_RES (10)..(10): Citrulline
GNXYEGCWEXGMKNGA

SEQ ID NO: 4378 - protein, 16 aa, Artificial Sequence
  source: /note="Description of Artificial Sequence: Synthetic peptide"
  MOD_RES (6)..(6): Citrulline
  MOD_RES (14)..(14): Citrulline
EGCWEXGMKNGAGXFF

SEQ ID NO: 4379 - protein, 16 aa, Artificial Sequence
  source: /note="Description of Artificial Sequence: Synthetic peptide"
  MOD_RES (13)..(13): Citrulline
PYECKECGKAFTXGSH

SEQ ID NO: 4380 - protein, 16 aa, Artificial Sequence
  source: /note="Description of Artificial Sequence: Synthetic peptide"
  MOD_RES (9)..(9): Citrulline
KECGKAFTXGSHLTQH

SEQ ID NO: 4381 - protein, 16 aa, Artificial Sequence
  source: /note="Description of Artificial Sequence: Synthetic peptide"
  MOD_RES (5)..(5): Citrulline
  MOD_RES (14)..(14): Citrulline
KAFTXGSHLTQHQXIH

SEQ ID NO: 4382 - protein, 16 aa, Artificial Sequence
  source: /note="Description of Artificial Sequence: Synthetic peptide"
  MOD_RES (13)..(13): Citrulline
SHECKECGKAFIXGSN

SEQ ID NO: 4383 - protein, 16 aa, Artificial Sequence
  source: /note="Description of Artificial Sequence: Synthetic peptide"
  MOD_RES (9)..(9): Citrulline
KECGKAFIXGSNLAQH

SEQ ID NO: 4384 - protein, 16 aa, Artificial Sequence
  source: /note="Description of Artificial Sequence: Synthetic peptide"
  MOD_RES (5)..(5): Citrulline
KAFIXGSNLAQHQNVH

SEQ ID NO: 4385 - protein, 16 aa, Artificial Sequence
  source: /note="Description of Artificial Sequence: Synthetic peptide"
  MOD_RES (9)..(9): Citrulline
  MOD_RES (15)..(15): Citrulline
KECGKTFFXGSELNXH

SEQ ID NO: 4386 - protein, 16 aa, Artificial Sequence
  source: /note="Description of Artificial Sequence: Synthetic peptide"
  MOD_RES (5)..(5): Citrulline
  MOD_RES (11)..(11): Citrulline
KTFFXGSELNXHQKIH

SEQ ID NO: 4387 - protein, 16 aa, Artificial Sequence
  source: /note="Description of Artificial Sequence: Synthetic peptide"
  MOD_RES (15)..(15): Citrulline
DFNCWESLGEAYLSXG

SEQ ID NO: 4388 - protein, 16 aa, Artificial Sequence
  source: /note="Description of Artificial Sequence: Synthetic peptide"
  MOD_RES (11)..(11): Citrulline
WESLGEAYLSXGGYTT

SEQ ID NO: 4389 - protein, 16 aa, Artificial Sequence
  source: /note="Description of Artificial Sequence: Synthetic peptide"
  MOD_RES (14)..(14): Citrulline
AQHMSPWDEKHVLXGS

SEQ ID NO: 4390 - protein, 16 aa, Artificial Sequence
  source: /note="Description of Artificial Sequence: Synthetic peptide"
  MOD_RES (10)..(10): Citrulline
SPWDEKHVLXGSPLYM

SEQ ID NO: 4391 - protein, 16 aa, Artificial Sequence
  source: /note="Description of Artificial Sequence: Synthetic peptide"
  MOD_RES (6)..(6): Citrulline
EKHVLXGSPLYMAPEM

SEQ ID NO: 4392 - protein, 16 aa, Artificial Sequence
  source: /note="Description of Artificial Sequence: Synthetic peptide"
  MOD_RES (9)..(9): Citrulline
  MOD_RES (16)..(16): Citrulline
GGSGGSGGXGTGQLNX

SEQ ID NO: 4393 - protein, 16 aa, Artificial Sequence
  source: /note="Description of Artificial Sequence: Synthetic peptide"
  MOD_RES (10)..(11): Citrulline
PHAQKFIDTXXGKLLA

SEQ ID NO: 4394 - protein, 16 aa, Artificial Sequence
  source: /note="Description of Artificial Sequence: Synthetic peptide"
  MOD_RES (6)..(7): Citrulline
KFIDTXXGKLLAPDCS

SEQ ID NO: 4395 - protein, 16 aa, Artificial Sequence
  source: /note="Description of Artificial Sequence: Synthetic peptide"
  MOD_RES (13)..(13): Citrulline
  MOD_RES (16)..(16): Citrulline
STYFHMALGSLGXGSX

SEQ ID NO: 4396 - protein, 16 aa, Artificial Sequence
  source: /note="Description of Artificial Sequence: Synthetic peptide"
  MOD_RES (9)..(9): Citrulline
  MOD_RES (12)..(12): Citrulline
HMALGSLGXGSXLLCE

SEQ ID NO: 4397 - protein, 16 aa, Artificial Sequence
  source: /note="Description of Artificial Sequence: Synthetic peptide"
  MOD_RES (5)..(5): Citrulline
  MOD_RES (8)..(8): Citrulline
GSLGXGSXLLCETSLG

SEQ ID NO: 4398 - protein, 16 aa, Artificial Sequence
  source: /note="Description of Artificial Sequence: Synthetic peptide"
  MOD_RES (1)..(1): Citrulline
  MOD_RES (4)..(4): Citrulline
XGSXLLCETSLGYKMD

SEQ ID NO: 4399 - protein, 16 aa, Artificial Sequence
  source: /note="Description of Artificial Sequence: Synthetic peptide"
  MOD_RES (10)..(10): Citrulline
FIKGLSILLXGTVQEK

SEQ ID NO: 4400 - protein, 16 aa, Artificial Sequence
  source: /note="Description of Artificial Sequence: Synthetic peptide"
  MOD_RES (6)..(6): Citrulline
LSILLXGTVQEKLNWA

SEQ ID NO: 4401 - protein, 16 aa, Artificial Sequence
  source: /note="Description of Artificial Sequence: Synthetic peptide"
  MOD_RES (8)..(8): Citrulline
QPVDTAGXGQLYGGLT

SEQ ID NO: 4402 - protein, 16 aa, Artificial Sequence
  source: /note="Description of Artificial Sequence: Synthetic peptide"
  MOD_RES (4)..(4): Citrulline
  MOD_RES (6)..(6): Citrulline
GASXSXGILGKFVPPI

SEQ ID NO: 4403 - protein, 16 aa, Artificial Sequence
  source: /note="Description of Artificial Sequence: Synthetic peptide"
  MOD_RES (2)..(2): Citrulline
SXGILGKFVPPIPKQD

SEQ ID NO: 4404 - protein, 16 aa, Artificial Sequence
  source: /note="Description of Artificial Sequence: Synthetic peptide"
  MOD_RES (5)..(5): Citrulline
  MOD_RES (8)..(8): Citrulline
YSSLXEAXGSPNTASA

SEQ ID NO: 4405 - protein, 16 aa, Artificial Sequence
  source: /note="Description of Artificial Sequence: Synthetic peptide"
  MOD_RES (6)..(6): Citrulline
  MOD_RES (12)..(12): Citrulline
MAGAGXGAAVSXVQAG

SEQ ID NO: 4406 - protein, 16 aa, Artificial Sequence
  source: /note="Description of Artificial Sequence: Synthetic peptide"
  MOD_RES (2)..(2): Citrulline
  MOD_RES (8)..(8): Citrulline
GXGAAVSXVQAGPGSP

SEQ ID NO: 4407 - protein, 16 aa, Artificial Sequence
  source: /note="Description of Artificial Sequence: Synthetic peptide"
  MOD_RES (13)..(13): Citrulline
NETEESNLNMYTXGKQ

SEQ ID NO: 4408 - protein, 16 aa, Artificial Sequence
  source: /note="Description of Artificial Sequence: Synthetic peptide"
  MOD_RES (9)..(9): Citrulline
ESNLNMYTXGKQKDIQ

SEQ ID NO: 4409 - protein, 16 aa, Artificial Sequence
  source: /note="Description of Artificial Sequence: Synthetic peptide"
  MOD_RES (5)..(5): Citrulline
  MOD_RES (13)..(13): Citrulline
NMYTXGKQKDIQXTDE

SEQ ID NO: 4410 - protein, 16 aa, Artificial Sequence
  source: /note="Description of Artificial Sequence: Synthetic peptide"
  MOD_RES (6)..(6): Citrulline
  MOD_RES (10)..(10): Citrulline
DSQKKXGEAXGKSEPI

SEQ ID NO: 4411 - protein, 16 aa, Artificial Sequence
  source: /note="Description of Artificial Sequence: Synthetic peptide"
  MOD_RES (2)..(2): Citrulline
  MOD_RES (6)..(6): Citrulline
KXGEAXGKSEPIDVVP

SEQ ID NO: 4412 - protein, 16 aa, Artificial Sequence
  source: /note="Description of Artificial Sequence: Synthetic peptide"
  MOD_RES (9)..(9): Citrulline
  MOD_RES (11)..(11): Citrulline
SVTALAVSXGXLFSGA

SEQ ID NO: 4413 - protein, 16 aa, Artificial Sequence
  source: /note="Description of Artificial Sequence: Synthetic peptide"
  MOD_RES (5)..(5): Citrulline
  MOD_RES (7)..(7): Citrulline
LAVSXGXLFSGAVDST

SEQ ID NO: 4414 - protein, 16 aa, Artificial Sequence
  source: /note="Description of Artificial Sequence: Synthetic peptide"
  MOD_RES (9)..(9): Citrulline
CYGALFGPXGVNIGGV

SEQ ID NO: 4415 - protein, 16 aa, Artificial Sequence
  source: /note="Description of Artificial Sequence: Synthetic peptide"
  MOD_RES (5)..(5): Citrulline
LFGPXGVNIGGVGSYL

SEQ ID NO: 4416 - protein, 16 aa, Artificial Sequence
  source: /note="Description of Artificial Sequence: Synthetic peptide"
  MOD_RES (4)..(4): Citrulline
  MOD_RES (12)..(12): Citrulline
EPQXGMGFMPKXGLDV

SEQ ID NO: 4417 - protein, 16 aa, Artificial Sequence
  source: /note="Description of Artificial Sequence: Synthetic peptide"
  MOD_RES (10)..(10): Citrulline
GAHWIHGPSXGNPVFQ

SEQ ID NO: 4418 - protein, 16 aa, Artificial Sequence
  source: /note="Description of Artificial Sequence: Synthetic peptide"
  MOD_RES (6)..(6): Citrulline
IHGPSXGNPVFQLAAE

SEQ ID NO: 4419 - protein, 16 aa, Artificial Sequence
  source: /note="Description of Artificial Sequence: Synthetic peptide"
  MOD_RES (14)..(14): Citrulline
VISNGFKVCSSGGXGS

SEQ ID NO: 4420 - protein, 16 aa, Artificial Sequence
  source: /note="Description of Artificial Sequence: Synthetic peptide"
  MOD_RES (10)..(10): Citrulline
GFKVCSSGGXGSVELY

SEQ ID NO: 4421 - protein, 16 aa, Artificial Sequence
  source: /note="Description of Artificial Sequence: Synthetic peptide"
  MOD_RES (6)..(6): Citrulline
  MOD_RES (14)..(14): Citrulline
CSSGGXGSVELYTXDN

SEQ ID NO: 4422 - protein, 16 aa, Artificial Sequence
  source: /note="Description of Artificial Sequence: Synthetic peptide"
  MOD_RES (9)..(9): Citrulline
CCHCFPWCXGSGKSNV

SEQ ID NO: 4423 - protein, 16 aa, Artificial Sequence
  source: /note="Description of Artificial Sequence: Synthetic peptide"
  MOD_RES (2)..(2): Citrulline
  MOD_RES (9)..(9): Citrulline
CXHCFPWCXGSSKSNV

SEQ ID NO: 4424 - protein, 16 aa, Artificial Sequence
  source: /note="Description of Artificial Sequence: Synthetic peptide"
  MOD_RES (5)..(5): Citrulline
FPWCXGSSKSNVGTSG

SEQ ID NO: 4425 - protein, 16 aa, Artificial Sequence
  source: /note="Description of Artificial Sequence: Synthetic peptide"
  MOD_RES (4)..(4): Citrulline
  MOD_RES (12)..(12): Citrulline
EQSXAIGNVHPXGVQS

SEQ ID NO: 4426 - protein, 16 aa, Artificial Sequence
  source: /note="Description of Artificial Sequence: Synthetic peptide"
  MOD_RES (8)..(8): Citrulline
  MOD_RES (14)..(14): Citrulline
AIGNVHPXGVQSQXDT

SEQ ID NO: 4427 - protein, 16 aa, Artificial Sequence
  source: /note="Description of Artificial Sequence: Synthetic peptide"
  MOD_RES (9)..(9): Citrulline
  MOD_RES (11)..(11): Citrulline
NELIPSIIXGXATGIT

SEQ ID NO: 4428 - protein, 16 aa, Artificial Sequence
  source: /note="Description of Artificial Sequence: Synthetic peptide"
  MOD_RES (5)..(5): Citrulline
  MOD_RES (7)..(7): Citrulline
PSIIXGXATGITGNFA

SEQ ID NO: 4429 - protein, 16 aa, Artificial Sequence
  source: /note="Description of Artificial Sequence: Synthetic peptide"
  MOD_RES (6)..(6): Citrulline
  MOD_RES (9)..(9): Citrulline
LGDLAXGFXGGAKPPG

SEQ ID NO: 4430 - protein, 16 aa, Artificial Sequence
  source: /note="Description of Artificial Sequence: Synthetic peptide"
  MOD_RES (2)..(2): Citrulline
  MOD_RES (5)..(5): Citrulline
AXGFXGGAKPPGVSPG

SEQ ID NO: 4431 - protein, 16 aa, Artificial Sequence
  source: /note="Description of Artificial Sequence: Synthetic peptide"
  MOD_RES (7)..(7): Citrulline
TVLITSXGAQILTKLP

SEQ ID NO: 4432 - protein, 15 aa, Artificial Sequence
  source: /note="Description of Artificial Sequence: Synthetic peptide"
  MOD_RES (3)..(3): Citrulline
TSXGAQILTKLPHEA

SEQ ID NO: 4433 - protein, 16 aa, Artificial Sequence
  source: /note="Description of Artificial Sequence: Synthetic peptide"
  MOD_RES (7)..(7): Citrulline
LHMAAIXGDVKQVKEL

SEQ ID NO: 4434 - protein, 16 aa, Artificial Sequence
  source: /note="Description of Artificial Sequence: Synthetic peptide"
  MOD_RES (3)..(3): Citrulline
AIXGDVKQVKELISLG

SEQ ID NO: 4435 - protein, 16 aa, Artificial Sequence
  source: /note="Description of Artificial Sequence: Synthetic peptide"
  MOD_RES (11)..(11): Citrulline
  MOD_RES (14)..(14): Citrulline
QPSFHQADNVXGTXHH

SEQ ID NO: 4436 - protein, 16 aa, Artificial Sequence
  source: /note="Description of Artificial Sequence: Synthetic peptide"
  MOD_RES (7)..(7): Citrulline
  MOD_RES (10)..(10): Citrulline
HQADNVXGTXHHGLVE

SEQ ID NO: 4437 - protein, 16 aa, Artificial Sequence
  source: /note="Description of Artificial Sequence: Synthetic peptide"
  MOD_RES (9)..(9): Citrulline
QYLQLGPSXGQYYGGS

SEQ ID NO: 4438 - protein, 16 aa, Artificial Sequence
  source: /note="Description of Artificial Sequence: Synthetic peptide"
  MOD_RES (5)..(5): Citrulline
LGPSXGQYYGGSLPNV

SEQ ID NO: 4439 - protein, 16 aa, Artificial Sequence
  source: /note="Description of Artificial Sequence: Synthetic peptide"
  MOD_RES (2)..(2): Citrulline
  MOD_RES (11)..(11): Citrulline
NXGVLSYLEPXGSLLL

SEQ ID NO: 4440 - protein, 16 aa, Artificial Sequence
  source: /note="Description of Artificial Sequence: Synthetic peptide"
  MOD_RES (7)..(7): Citrulline
LSYLEPXGSLLLGGLD

SEQ ID NO: 4441 - protein, 16 aa, Artificial Sequence
  source: /note="Description of Artificial Sequence: Synthetic peptide"
  MOD_RES (10)..(10): Citrulline
  MOD_RES (13)..(13): Citrulline
KSQVLFSVTXGAXHGE

SEQ ID NO: 4442 - protein, 16 aa, Artificial Sequence
  source: /note="Description of Artificial Sequence: Synthetic peptide"
  MOD_RES (6)..(6): Citrulline
  MOD_RES (9)..(9): Citrulline
LFSVTXGAXHGELELD

SEQ ID NO: 4443 - protein, 16 aa, Artificial Sequence
  source: /note="Description of Artificial Sequence: Synthetic peptide"
  MOD_RES (2)..(2): Citrulline
  MOD_RES (5)..(5): Citrulline
TXGAXHGELELDIPGA

SEQ ID NO: 4444 - protein, 16 aa, Artificial Sequence
  source: /note="Description of Artificial Sequence: Synthetic peptide"
  MOD_RES (8)..(8): Citrulline
GYLVMVSXGALADEPP

SEQ ID NO: 4445 - protein, 16 aa, Artificial Sequence
  source: /note="Description of Artificial Sequence: Synthetic peptide"
  MOD_RES (4)..(4): Citrulline
MVSXGALADEPPSLDP

SEQ ID NO: 4446 - protein, 16 aa, Artificial Sequence
  source: /note="Description of Artificial Sequence: Synthetic peptide"
  MOD_RES (9)..(9): Citrulline
FQVTQFPSXGQLLVSE

SEQ ID NO: 4447 - protein, 16 aa, Artificial Sequence
  source: /note="Description of Artificial Sequence: Synthetic peptide"
  MOD_RES (5)..(5): Citrulline
QFPSXGQLLVSEEPLH

SEQ ID NO: 4448 - protein, 16 aa, Artificial Sequence
  source: /note="Description of Artificial Sequence: Synthetic peptide"
  MOD_RES (10)..(11): Citrulline
QAQLTLSYSXXGDLEI

SEQ ID NO: 4449 - protein, 16 aa, Artificial Sequence
  source: /note="Description of Artificial Sequence: Synthetic peptide"
  MOD_RES (6)..(7): Citrulline
TLSYSXXGDLEISLTS

SEQ ID NO: 4450 - protein, 16 aa, Artificial Sequence
  source: /note="Description of Artificial Sequence: Synthetic peptide"
  MOD_RES (10)..(10): Citrulline
  MOD_RES (15)..(15): Citrulline
PMIPSASTSXGSSSXQ

SEQ ID NO: 4451 - protein, 16 aa, Artificial Sequence
  source: /note="Description of Artificial Sequence: Synthetic peptide"
  MOD_RES (6)..(6): Citrulline
  MOD_RES (11)..(11): Citrulline
SASTSXGSSSXQSSTA

SEQ ID NO: 4452 - protein, 15 aa, Artificial Sequence
  source: /note="Description of Artificial Sequence: Synthetic peptide"
  MOD_RES (2)..(2): Citrulline
  MOD_RES (7)..(7): Citrulline
SXGSSSXQSSTAASS

SEQ ID NO: 4453 - protein, 16 aa, Artificial Sequence
  source: /note="Description of Artificial Sequence: Synthetic peptide"
  MOD_RES (15)..(15): Citrulline
TLETKDPTNGYYKVXG

SEQ ID NO: 4454 - protein, 16 aa, Artificial Sequence
  source: /note="Description of Artificial Sequence: Synthetic peptide"
  MOD_RES (11)..(11): Citrulline
KDPTNGYYKVXGVSVS

SEQ ID NO: 4455 - protein, 16 aa, Artificial Sequence
  source: /note="Description of Artificial Sequence: Synthetic peptide"
  MOD_RES (10)..(10): Citrulline
KLNDFFVEIXGTLKMM

SEQ ID NO: 4456 - protein, 16 aa, Artificial Sequence
  source: /note="Description of Artificial Sequence: Synthetic peptide"
  MOD_RES (6)..(6): Citrulline
FFVEIXGTLKMMCESF

SEQ ID NO: 4457 - protein, 16 aa, Artificial Sequence
  source: /note="Description of Artificial Sequence: Synthetic peptide"
  MOD_RES (2)..(2): Citrulline
IXGTLKMMCESFIYNQ

SEQ ID NO: 4458 - protein, 16 aa, Artificial Sequence
  source: /note="Description of Artificial Sequence: Synthetic peptide"
  MOD_RES (8)..(8): Citrulline
GFKEIVSXGVKVDYLT

SEQ ID NO: 4459 - protein, 16 aa, Artificial Sequence
  source: /note="Description of Artificial Sequence: Synthetic peptide"
  MOD_RES (4)..(4): Citrulline
IVSXGVKVDYLTPDFP

SEQ ID NO: 4460 - protein, 16 aa, Artificial Sequence
  source: /note="Description of Artificial Sequence: Synthetic peptide"
  MOD_RES (11)..(11): Citrulline
ATSYPSAYAPXGSIYK

SEQ ID NO: 4461 - protein, 16 aa, Artificial Sequence
  source: /note="Description of Artificial Sequence: Synthetic peptide"
  MOD_RES (7)..(7): Citrulline
PSAYAPXGSIYKFVDP

SEQ ID NO: 4462 - protein, 16 aa, Artificial Sequence
  source: /note="Description of Artificial Sequence: Synthetic peptide"
  MOD_RES (10)..(10): Citrulline
LPFINFMKTXGTSFLN

SEQ ID NO: 4463 - protein, 16 aa, Artificial Sequence
  source: /note="Description of Artificial Sequence: Synthetic peptide"
  MOD_RES (6)..(6): Citrulline
NFMKTXGTSFLNAYTN

SEQ ID NO: 4464 - protein, 16 aa, Artificial Sequence
  source: /note="Description of Artificial Sequence: Synthetic peptide"
  MOD_RES (13)..(13): Citrulline
ESSSQATTPFLPXGEM

SEQ ID NO: 4465 - protein, 12 aa, Artificial Sequence
  source: /note="Description of Artificial Sequence: Synthetic peptide"
  MOD_RES (9)..(9): Citrulline
QATTPFLPXGEM

SEQ ID NO: 4466 - protein, 16 aa, Artificial Sequence
  source: /note="Description of Artificial Sequence: Synthetic peptide"
  MOD_RES (11)..(11): Citrulline
PSTATPECTAXGASLE

SEQ ID NO: 4467 - protein, 16 aa, Artificial Sequence
  source: /note="Description of Artificial Sequence: Synthetic peptide"
  MOD_RES (7)..(7): Citrulline
  MOD_RES (15)..(15): Citrulline
TPECTAXGASLEDPXG

SEQ ID NO: 4468 - protein, 16 aa, Artificial Sequence
  source: /note="Description of Artificial Sequence: Synthetic peptide"
  MOD_RES (10)..(10): Citrulline
  MOD_RES (12)..(12): Citrulline
WESKQMPQYXGXTEFV

SEQ ID NO: 4469 - protein, 16 aa, Artificial Sequence
  source: /note="Description of Artificial Sequence: Synthetic peptide"
  MOD_RES (6)..(6): Citrulline
  MOD_RES (8)..(8): Citrulline
QMPQYXGXTEFVKDSI

SEQ ID NO: 4470 - protein, 16 aa, Artificial Sequence
  source: /note="Description of Artificial Sequence: Synthetic peptide"
  MOD_RES (10)..(10): Citrulline
NCTSSKWVPXGDYIAS

SEQ ID NO: 4471 - protein, 16 aa, Artificial Sequence
  source: /note="Description of Artificial Sequence: Synthetic peptide"
  MOD_RES (6)..(6): Citrulline
SKWVPXGDYIASNTDE

SEQ ID NO: 4472 - protein, 16 aa, Artificial Sequence
  source: /note="Description of Artificial Sequence: Synthetic peptide"
  MOD_RES (3)..(3): Citrulline
  MOD_RES (12)..(12): Citrulline
YIXEDDGKTCTXGDKY

SEQ ID NO: 4473 - protein, 16 aa, Artificial Sequence
  source: /note="Description of Artificial Sequence: Synthetic peptide"
  MOD_RES (8)..(8): Citrulline
DDGKTCTXGDKYPNDT

SEQ ID NO: 4474 - protein, 16 aa, Artificial Sequence
  source: /note="Description of Artificial Sequence: Synthetic peptide"
  MOD_RES (4)..(4): Citrulline
TCTXGDKYPNDTGHEK

SEQ ID NO: 4475 - protein, 16 aa, Artificial Sequence
  source: /note="Description of Artificial Sequence: Synthetic peptide"
  MOD_RES (14)..(14): Citrulline
FPGMPGPPGQPGPXGS

SEQ ID NO: 4476 - protein, 16 aa, Artificial Sequence
  source: /note="Description of Artificial Sequence: Synthetic peptide"
  MOD_RES (10)..(10): Citrulline
PGPPGQPGPXGSMGPM

SEQ ID NO: 4477 - protein, 16 aa, Artificial Sequence
  source: /note="Description of Artificial Sequence: Synthetic peptide"
  MOD_RES (6)..(6): Citrulline
GQPGPXGSMGPMGPSP

SEQ ID NO: 4478 - protein, 16 aa, Artificial Sequence
  source: /note="Description of Artificial Sequence: Synthetic peptide"
  MOD_RES (10)..(10): Citrulline
KTAIEKITQXGGLSNV

SEQ ID NO: 4479 - protein, 16 aa, Artificial Sequence
  source: /note="Description of Artificial Sequence: Synthetic peptide"
  MOD_RES (6)..(6): Citrulline
  MOD_RES (14)..(14): Citrulline
EKITQXGGLSNVGXAI

SEQ ID NO: 4480 - protein, 16 aa, Artificial Sequence
  source: /note="Description of Artificial Sequence: Synthetic peptide"
  MOD_RES (6)..(6): Citrulline
  MOD_RES (13)..(13): Citrulline
DPQKPXGDVFIPXQPS

SEQ ID NO: 4481 - protein, 16 aa, Artificial Sequence
  source: /note="Description of Artificial Sequence: Synthetic peptide"
  MOD_RES (7)..(8): Citrulline
NKITVLXXGAFADVTQ

SEQ ID NO: 4482 - protein, 16 aa, Artificial Sequence
  source: /note="Description of Artificial Sequence: Synthetic peptide"
  MOD_RES (3)..(4): Citrulline
VLXXGAFADVTQVTSL

SEQ ID NO: 4483 - protein, 16 aa, Artificial Sequence
  source: /note="Description of Artificial Sequence: Synthetic peptide"
  MOD_RES (4)..(4): Citrulline
  MOD_RES (9)..(9): Citrulline
LPSXSYPLXGSHSLDD

SEQ ID NO: 4484 - protein, 16 aa, Artificial Sequence
  source: /note="Description of Artificial Sequence: Synthetic peptide"
  MOD_RES (10)..(10): Citrulline
  MOD_RES (15)..(15): Citrulline
GSSETPKMTXGVLSXT

SEQ ID NO: 4485 - protein, 16 aa, Artificial Sequence
  source: /note="Description of Artificial Sequence: Synthetic peptide"
  MOD_RES (6)..(6): Citrulline
  MOD_RES (11)..(11): Citrulline
TPKMTXGVLSXTSSIQ

SEQ ID NO: 4486 - protein, 16 aa, Artificial Sequence
  source: /note="Description of Artificial Sequence: Synthetic peptide"
  MOD_RES (14)..(14): Citrulline
ETKPQTSTVNKFLXGS

SEQ ID NO: 4487 - protein, 16 aa, Artificial Sequence
  source: /note="Description of Artificial Sequence: Synthetic peptide"
  MOD_RES (10)..(10): Citrulline
QTSTVNKFLXGSNAES

SEQ ID NO: 4488 - protein, 16 aa, Artificial Sequence
  source: /note="Description of Artificial Sequence: Synthetic peptide"
  MOD_RES (6)..(6): Citrulline
  MOD_RES (13)..(13): Citrulline
VNKFLXGSNAESXKED

SEQ ID NO: 4489 - protein, 16 aa, Artificial Sequence
  source: /note="Description of Artificial Sequence: Synthetic peptide"
  MOD_RES (9)..(10): Citrulline
ETKLPSASXXGNSFSP

SEQ ID NO: 4490 - protein, 16 aa, Artificial Sequence
  source: /note="Description of Artificial Sequence: Synthetic peptide"
  MOD_RES (5)..(6): Citrulline
PSASXXGNSFSPWKPP

SEQ ID NO: 4491 - protein, 16 aa, Artificial Sequence
  source: /note="Description of Artificial Sequence: Synthetic peptide"
  MOD_RES (7)..(7): Citrulline
  MOD_RES (9)..(9): Citrulline
PFPSVPXGXGQQGQGP

SEQ ID NO: 4492 - protein, 16 aa, Artificial Sequence
  source: /note="Description of Artificial Sequence: Synthetic peptide"
  MOD_RES (3)..(3): Citrulline
  MOD_RES (5)..(5): Citrulline
VPXGXGQQGQGPWGTG

SEQ ID NO: 4493 - protein, 16 aa, Artificial Sequence
  source: /note="Description of Artificial Sequence: Synthetic peptide"
  MOD_RES (7)..(7): Citrulline
FHIDPLXGAIMAAGPL

SEQ ID NO: 4494 - protein, 16 aa, Artificial Sequence
  source: /note="Description of Artificial Sequence: Synthetic peptide"
  MOD_RES (3)..(3): Citrulline
PLXGAIMAAGPLNGAS

SEQ ID NO: 4495 - protein, 16 aa, Artificial Sequence
  source: /note="Description of Artificial Sequence: Synthetic peptide"
  MOD_RES (5)..(5): Citrulline
  MOD_RES (10)..(10): Citrulline
VIDNXGSCHXGLKFEG

SEQ ID NO: 4496 - protein, 16 aa, Artificial Sequence
  source: /note="Description of Artificial Sequence: Synthetic peptide"
  MOD_RES (1)..(1): Citrulline
  MOD_RES (6)..(6): Citrulline
XGSCHXGLKFEGAFKY

SEQ ID NO: 4497 - protein, 16 aa, Artificial Sequence
  source: /note="Description of Artificial Sequence: Synthetic peptide"
  MOD_RES (5)..(5): Citrulline
  MOD_RES (15)..(15): Citrulline
QAPLXGTVMQAPAVXQ

SEQ ID NO: 4498 - protein, 16 aa, Artificial Sequence
  source: /note="Description of Artificial Sequence: Synthetic peptide"
  MOD_RES (10)..(11): Citrulline
TKHLIPQESXXGLPLT

SEQ ID NO: 4499 - protein, 16 aa, Artificial Sequence
  source: /note="Description of Artificial Sequence: Synthetic peptide"
  MOD_RES (6)..(7): Citrulline
IPQESXXGLPLTGEYY

SEQ ID NO: 4500 - protein, 16 aa, Artificial Sequence
  source: /note="Description of Artificial Sequence: Synthetic peptide"
  MOD_RES (2)..(3): Citrulline
SXXGLPLTGEYYVENA

SEQ ID NO: 4501 - protein, 16 aa, Artificial Sequence
  source: /note="Description of Artificial Sequence: Synthetic peptide"
  MOD_RES (8)..(8): Citrulline
KPTIFGHXGAPMLGPE

SEQ ID NO: 4502 - protein, 16 aa, Artificial Sequence
  source: /note="Description of Artificial Sequence: Synthetic peptide"
  MOD_RES (4)..(4): Citrulline
FGHXGAPMLGPENTMM

SEQ ID NO: 4503 - protein, 16 aa, Artificial Sequence
  source: /note="Description of Artificial Sequence: Synthetic peptide"
  MOD_RES (10)..(10): Citrulline
  MOD_RES (14)..(14): Citrulline
AYVTVGPQFXGQTXGL

SEQ ID NO: 4504 - protein, 16 aa, Artificial Sequence
  source: /note="Description of Artificial Sequence: Synthetic peptide"
  MOD_RES (6)..(6): Citrulline
  MOD_RES (10)..(10): Citrulline
VGPQFXGQTXGLCGNF

SEQ ID NO: 4505 - protein, 16 aa, Artificial Sequence
  source: /note="Description of Artificial Sequence: Synthetic peptide"
  MOD_RES (2)..(2): Citrulline
  MOD_RES (6)..(6): Citrulline
FXGQTXGLCGNFNGDT

SEQ ID NO: 4506 - protein, 16 aa, Artificial Sequence
  source: /note="Description of Artificial Sequence: Synthetic peptide"
  MOD_RES (10)..(10): Citrulline
CCSPAHQPVXGSAQPP

SEQ ID NO: 4507 - protein, 16 aa, Artificial Sequence
  source: /note="Description of Artificial Sequence: Synthetic peptide"
  MOD_RES (6)..(6): Citrulline
AHQPVXGSAQPPASDL

SEQ ID NO: 4508 - protein, 16 aa, Artificial Sequence
  source: /note="Description of Artificial Sequence: Synthetic peptide"
  MOD_RES (10)..(10): Citrulline
QLSKTNLYIXGLPPGT

SEQ ID NO: 4509 - protein, 16 aa, Artificial Sequence
  source: /note="Description of Artificial Sequence: Synthetic peptide"
  MOD_RES (6)..(6): Citrulline
TNLYIXGLPPGTTDQD

SEQ ID NO: 4510 - protein, 16 aa, Artificial Sequence
  source: /note="Description of Artificial Sequence: Synthetic peptide"
  MOD_RES (2)..(2): Citrulline
IXGLPPGTTDQDLIKL

SEQ ID NO: 4511 - protein, 16 aa, Artificial Sequence
  source: /note="Description of Artificial Sequence: Synthetic peptide"
  MOD_RES (10)..(10): Citrulline
DFNSEKDIVXGSSKLI

SEQ ID NO: 4512 - protein, 16 aa, Artificial Sequence
  source: /note="Description of Artificial Sequence: Synthetic peptide"
  MOD_RES (6)..(6): Citrulline
EKDIVXGSSKLITEQE

SEQ ID NO: 4513 - protein, 16 aa, Artificial Sequence
  source: /note="Description of Artificial Sequence: Synthetic peptide"
  MOD_RES (11)..(11): Citrulline
LKELSYMVVSXGQLVA

SEQ ID NO: 4514 - protein, 16 aa, Artificial Sequence
  source: /note="Description of Artificial Sequence: Synthetic peptide"
  MOD_RES (7)..(7): Citrulline
SYMVVSXGQLVAVGKQ

SEQ ID NO: 4515 - protein, 16 aa, Artificial Sequence
  source: /note="Description of Artificial Sequence: Synthetic peptide"
  MOD_RES (3)..(3): Citrulline
VSXGQLVAVGKQNSTM

SEQ ID NO: 4516 - protein, 16 aa, Artificial Sequence
  source: /note="Description of Artificial Sequence: Synthetic peptide"
  MOD_RES (11)..(11): Citrulline
SFPSLGSCNSXGALGA

SEQ ID NO: 4517 - protein, 16 aa, Artificial Sequence
  source: /note="Description of Artificial Sequence: Synthetic peptide"
  MOD_RES (7)..(7): Citrulline
LGSCNSXGALGALMAC

SEQ ID NO: 4518 - protein, 16 aa, Artificial Sequence
  source: /note="Description of Artificial Sequence: Synthetic peptide"
  MOD_RES (1)..(1): Citrulline
  MOD_RES (11)..(11): Citrulline
XLDLMMNVNTXGTYLA

SEQ ID NO: 4519 - protein, 16 aa, Artificial Sequence
  source: /note="Description of Artificial Sequence: Synthetic peptide"
  MOD_RES (6)..(6): Citrulline
  MOD_RES (11)..(11): Citrulline
GPQVFXCAAAXGSELC

SEQ ID NO: 4520 - protein, 16 aa, Artificial Sequence
  source: /note="Description of Artificial Sequence: Synthetic peptide"
  MOD_RES (2)..(2): Citrulline
  MOD_RES (7)..(7): Citrulline
FXCAAAXGSELCQTAL

SEQ ID NO: 4521 - protein, 16 aa, Artificial Sequence
  source: /note="Description of Artificial Sequence: Synthetic peptide"
  MOD_RES (5)..(5): Citrulline
  MOD_RES (13)..(13): Citrulline
AEGGXGDAGWGLXGAL

SEQ ID NO: 4522 - protein, 16 aa, Artificial Sequence
  source: /note="Description of Artificial Sequence: Synthetic peptide"
  MOD_RES (6)..(6): Citrulline
  MOD_RES (9)..(9): Citrulline
GPTVLXGSXHPQPQGL

SEQ ID NO: 4523 - protein, 16 aa, Artificial Sequence
  source: /note="Description of Artificial Sequence: Synthetic peptide"
  MOD_RES (2)..(2): Citrulline
  MOD_RES (5)..(5): Citrulline
LXGSXHPQPQGLEVTG

SEQ ID NO: 4524 - protein, 16 aa, Artificial Sequence
  source: /note="Description of Artificial Sequence: Synthetic peptide"
  MOD_RES (8)..(8): Citrulline
LLELSKLXGSLPFSPC

SEQ ID NO: 4525 - protein, 16 aa, Artificial Sequence
  source: /note="Description of Artificial Sequence: Synthetic peptide"
  MOD_RES (8)..(8): Citrulline
GNALTAKXGIFGKTGD

SEQ ID NO: 4526 - protein, 16 aa, Artificial Sequence
  source: /note="Description of Artificial Sequence: Synthetic peptide"
  MOD_RES (4)..(4): Citrulline
TAKXGIFGKTGDLQTI

SEQ ID NO: 4527 - protein, 16 aa, Artificial Sequence
  source: /note="Description of Artificial Sequence: Synthetic peptide"
  MOD_RES (10)..(10): Citrulline
QAGGGFTSKXGTFGSV

SEQ ID NO: 4528 - protein, 16 aa, Artificial Sequence
  source: /note="Description of Artificial Sequence: Synthetic peptide"
  MOD_RES (6)..(6): Citrulline
GFTSKXGTFGSVGKLE

SEQ ID NO: 4529 - protein, 16 aa, Artificial Sequence
  source: /note="Description of Artificial Sequence: Synthetic peptide"
  MOD_RES (8)..(8): Citrulline
THIDWDSXGKLLQVNS

SEQ ID NO: 4530 - protein, 16 aa, Artificial Sequence
  source: /note="Description of Artificial Sequence: Synthetic peptide"
  MOD_RES (8)..(8): Citrulline
LLAVVQSXGSMLAPGL

SEQ ID NO: 4531 - protein, 16 aa, Artificial Sequence
  source: /note="Description of Artificial Sequence: Synthetic peptide"
  MOD_RES (4)..(4): Citrulline
VQSXGSMLAPGLHMQL

SEQ ID NO: 4532 - protein, 16 aa, Artificial Sequence
  source: /note="Description of Artificial Sequence: Synthetic peptide"
  MOD_RES (13)..(13): Citrulline
LQQEKPSLYIGVXGTV

SEQ ID NO: 4533 - protein, 16 aa, Artificial Sequence
  source: /note="Description of Artificial Sequence: Synthetic peptide"
  MOD_RES (9)..(9): Citrulline
  MOD_RES (14)..(14): Citrulline
KPSLYIGVXGTVVXSM

SEQ ID NO: 4534 - protein, 16 aa, Artificial Sequence
  source: /note="Description of Artificial Sequence: Synthetic peptide"
  MOD_RES (5)..(5): Citrulline
  MOD_RES (10)..(10): Citrulline
YIGVXGTVVXSMQEVL

SEQ ID NO: 4535 - protein, 16 aa, Artificial Sequence
  source: /note="Description of Artificial Sequence: Synthetic peptide"
  MOD_RES (11)..(11): Citrulline
PGGAWQQSQGXGSIAP

SEQ ID NO: 4536 - protein, 16 aa, Artificial Sequence
  source: /note="Description of Artificial Sequence: Synthetic peptide"
  MOD_RES (7)..(7): Citrulline
  MOD_RES (13)..(13): Citrulline
WQQSQGXGSIAPXGIS

SEQ ID NO: 4537 - protein, 16 aa, Artificial Sequence
  source: /note="Description of Artificial Sequence: Synthetic peptide"
  MOD_RES (8)..(8): Citrulline
FKPSEGPXGVVLALPT

SEQ ID NO: 4538 - protein, 16 aa, Artificial Sequence
  source: /note="Description of Artificial Sequence: Synthetic peptide"
  MOD_RES (4)..(4): Citrulline
EGPXGVVLALPTQGEP

SEQ ID NO: 4539 - protein, 16 aa, Artificial Sequence
  source: /note="Description of Artificial Sequence: Synthetic peptide"
  MOD_RES (9)..(9): Citrulline
GLEEPKGPXGSQGGGG

SEQ ID NO: 4540 - protein, 16 aa, Artificial Sequence
  source: /note="Description of Artificial Sequence: Synthetic peptide"
  MOD_RES (5)..(5): Citrulline
PKGPXGSQGGGGGGSS

SEQ ID NO: 4541 - protein, 16 aa, Artificial Sequence
  source: /note="Description of Artificial Sequence: Synthetic peptide"
  MOD_RES (2)..(2): Citrulline
  MOD_RES (12)..(12): Citrulline
YXCNESGKAFHXGSLL

SEQ ID NO: 4542 - protein, 16 aa, Artificial Sequence
  source: /note="Description of Artificial Sequence: Synthetic peptide"
  MOD_RES (8)..(8): Citrulline
ESGKAFHXGSLLTVHQ

SEQ ID NO: 4543 - protein, 16 aa, Artificial Sequence
  source: /note="Description of Artificial Sequence: Synthetic peptide"
  MOD_RES (9)..(9): Citrulline
TVHQIVHTXGKPYQCD

SEQ ID NO: 4544 - protein, 16 aa, Artificial Sequence
  source: /note="Description of Artificial Sequence: Synthetic peptide"
  MOD_RES (5)..(5): Citrulline
  MOD_RES (16)..(16): Citrulline
IVHTXGKPYQCDVCGX

SEQ ID NO: 4545 - protein, 16 aa, Artificial Sequence
  source: /note="Description of Artificial Sequence: Synthetic peptide"
  MOD_RES (12)..(12): Citrulline
LLHNWPDAFTLXGNNA

SEQ ID NO: 4546 - protein, 16 aa, Artificial Sequence
  source: /note="Description of Artificial Sequence: Synthetic peptide"
  MOD_RES (8)..(8): Citrulline
WPDAFTLXGNNASKVA

SEQ ID NO: 4547 - protein, 16 aa, Artificial Sequence
  source: /note="Description of Artificial Sequence: Synthetic peptide"
  MOD_RES (5)..(5): Citrulline
  MOD_RES (9)..(9): Citrulline
QNYFXSLPXGTSNMTY

SEQ ID NO: 4548 - protein, 16 aa, Artificial Sequence
  source: /note="Description of Artificial Sequence: Synthetic peptide"
  MOD_RES (1)..(1): Citrulline
  MOD_RES (5)..(5): Citrulline
XSLPXGTSNMTYGTFN

SEQ ID NO: 4549 - protein, 16 aa, Artificial Sequence
  source: /note="Description of Artificial Sequence: Synthetic peptide"
  MOD_RES (10)..(10): Citrulline
LTIHQIVHTXGKPYQC

SEQ ID NO: 4550 - protein, 16 aa, Artificial Sequence
  source: /note="Description of Artificial Sequence: Synthetic peptide"
  MOD_RES (6)..(6): Citrulline
QIVHTXGKPYQCGVCG

SEQ ID NO: 4551 - protein, 16 aa, Artificial Sequence
  source: /note="Description of Artificial Sequence: Synthetic peptide"
  MOD_RES (7)..(7): Citrulline
  MOD_RES (13)..(13): Citrulline
GNGVHLXGAGGGXEKG

SEQ ID NO: 4552 - protein, 16 aa, Artificial Sequence
  source: /note="Description of Artificial Sequence: Synthetic peptide"
  MOD_RES (3)..(3): Citrulline
  MOD_RES (9)..(9): Citrulline
HLXGAGGGXEKGSVGA

SEQ ID NO: 4553 - protein, 16 aa, Artificial Sequence
  source: /note="Description of Artificial Sequence: Synthetic peptide"
  MOD_RES (11)..(11): Citrulline
ELKGCPPPQGXGTQLE

SEQ ID NO: 4554 - protein, 16 aa, Artificial Sequence
  source: /note="Description of Artificial Sequence: Synthetic peptide"
  MOD_RES (7)..(7): Citrulline
CPPPQGXGTQLENVAL

SEQ ID NO: 4555 - protein, 16 aa, Artificial Sequence
  source: /note="Description of Artificial Sequence: Synthetic peptide"
  MOD_RES (3)..(3): Citrulline
QGXGTQLENVALHALL

SEQ ID NO: 4556 - protein, 16 aa, Artificial Sequence
  source: /note="Description of Artificial Sequence: Synthetic peptide"
  MOD_RES (5)..(5): Citrulline
  MOD_RES (11)..(11): Citrulline
DGSLXVTALPXGKLLS

SEQ ID NO: 4557 - protein, 16 aa, Artificial Sequence
  source: /note="Description of Artificial Sequence: Synthetic peptide"
  MOD_RES (1)..(1): Citrulline
  MOD_RES (7)..(7): Citrulline
XVTALPXGKLLSQLSC

SEQ ID NO: 4558 - protein, 16 aa, Artificial Sequence
  source: /note="Description of Artificial Sequence: Synthetic peptide"
  MOD_RES (3)..(3): Citrulline
LPXGKLLSQLSCHLDV

SEQ ID NO: 4559 - protein, 16 aa, Artificial Sequence
  source: /note="Description of Artificial Sequence: Synthetic peptide"
  MOD_RES (13)..(13): Citrulline
TDHEIAHNLFVTXGAP

SEQ ID NO: 4560 - protein, 16 aa, Artificial Sequence
  source: /note="Description of Artificial Sequence: Synthetic peptide"
  MOD_RES (9)..(9): Citrulline
IAHNLFVTXGAPPGKT

SEQ ID NO: 4561 - protein, 16 aa, Artificial Sequence
  source: /note="Description of Artificial Sequence: Synthetic peptide"
  MOD_RES (5)..(5): Citrulline
LFVTXGAPPGKTSPSS

SEQ ID NO: 4562 - protein, 16 aa, Artificial Sequence
  source: /note="Description of Artificial Sequence: Synthetic peptide"
  MOD_RES (11)..(11): Citrulline
QFKAEPPLTSXGFVEK

SEQ ID NO: 4563 - protein, 16 aa, Artificial Sequence
  source: /note="Description of Artificial Sequence: Synthetic peptide"
  MOD_RES (7)..(7): Citrulline
EPPLTSXGFVEKSTAL

SEQ ID NO: 4564 - protein, 16 aa, Artificial Sequence
  source: /note="Description of Artificial Sequence: Synthetic peptide"
  MOD_RES (9)..(9): Citrulline
  MOD_RES (14)..(14): Citrulline
GTGPGLEPXGSNSXTS

SEQ ID NO: 4565 - protein, 16 aa, Artificial Sequence
  source: /note="Description of Artificial Sequence: Synthetic peptide"
  MOD_RES (5)..(5): Citrulline
  MOD_RES (10)..(10): Citrulline
GLEPXGSNSXTSATSS

SEQ ID NO: 4566 - protein, 16 aa, Artificial Sequence
  source: /note="Description of Artificial Sequence: Synthetic peptide"
  MOD_RES (4)..(4): Citrulline
  MOD_RES (7)..(7): Citrulline
QLHXVLXGQWLSSSAP

SEQ ID NO: 4567 - protein, 16 aa, Artificial Sequence
  source: /note="Description of Artificial Sequence: Synthetic peptide"
  MOD_RES (3)..(3): Citrulline
VLXGQWLSSSAPVSSA

SEQ ID NO: 4568 - protein, 16 aa, Artificial Sequence
  source: /note="Description of Artificial Sequence: Synthetic peptide"
  MOD_RES (7)..(7): Citrulline
  MOD_RES (11)..(11): Citrulline
FCTFHGXGFTXGSWGF

SEQ ID NO: 4569 - protein, 16 aa, Artificial Sequence
  source: /note="Description of Artificial Sequence: Synthetic peptide"
  MOD_RES (5)..(5): Citrulline
  MOD_RES (10)..(10): Citrulline
ALLEXQVKKXGDFLMW

SEQ ID NO: 4570 - protein, 16 aa, Artificial Sequence
  source: /note="Description of Artificial Sequence: Synthetic peptide"
  MOD_RES (1)..(1): Citrulline
  MOD_RES (6)..(6): Citrulline
XQVKKXGDFLMWKENG

SEQ ID NO: 4571 - protein, 16 aa, Artificial Sequence
  source: /note="Description of Artificial Sequence: Synthetic peptide"
  MOD_RES (10)..(11): Citrulline
SKDGASTSLXXGTTDF

SEQ ID NO: 4572 - protein, 16 aa, Artificial Sequence
  source: /note="Description of Artificial Sequence: Synthetic peptide"
  MOD_RES (6)..(7): Citrulline
ASTSLXXGTTDFQSEK

SEQ ID NO: 4573 - protein, 16 aa, Artificial Sequence
  source: /note="Description of Artificial Sequence: Synthetic peptide"
  MOD_RES (2)..(3): Citrulline
LXXGTTDFQSEKLDST

SEQ ID NO: 4574 - protein, 16 aa, Artificial Sequence
  source: /note="Description of Artificial Sequence: Synthetic peptide"
  MOD_RES (12)..(12): Citrulline
  MOD_RES (15)..(15): Citrulline
SEIAKGKLEFTXGQXI

SEQ ID NO: 4575 - protein, 16 aa, Artificial Sequence
  source: /note="Description of Artificial Sequence: Synthetic peptide"
  MOD_RES (8)..(8): Citrulline
  MOD_RES (11)..(11): Citrulline
KGKLEFTXGQXIFVQG

SEQ ID NO: 4576 - protein, 16 aa, Artificial Sequence
  source: /note="Description of Artificial Sequence: Synthetic peptide"
  MOD_RES (2)..(2): Citrulline
  MOD_RES (9)..(9): Citrulline
TXNYIAMNXGAVKAGL

SEQ ID NO: 4577 - protein, 16 aa, Artificial Sequence
  source: /note="Description of Artificial Sequence: Synthetic peptide"
  MOD_RES (5)..(5): Citrulline
  MOD_RES (16)..(16): Citrulline
IAMNXGAVKAGLVTAX

SEQ ID NO: 4578 - protein, 16 aa, Artificial Sequence
  source: /note="Description of Artificial Sequence: Synthetic peptide"
  MOD_RES (10)..(10): Citrulline
QLNEIVELVXGKLSKQ

SEQ ID NO: 4579 - protein, 16 aa, Artificial Sequence
  source: /note="Description of Artificial Sequence: Synthetic peptide"
  MOD_RES (6)..(6): Citrulline
  MOD_RES (14)..(14): Citrulline
IVELVXGKLSKQTXTT

SEQ ID NO: 4580 - protein, 16 aa, Artificial Sequence
  source: /note="Description of Artificial Sequence: Synthetic peptide"
  MOD_RES (8)..(8): Citrulline
PEFFKGCXGKELAWEK

SEQ ID NO: 4581 - protein, 16 aa, Artificial Sequence
  source: /note="Description of Artificial Sequence: Synthetic peptide"
  MOD_RES (8)..(8): Citrulline
AEWLPPTXGLLCKDVS

SEQ ID NO: 4582 - protein, 16 aa, Artificial Sequence
  source: /note="Description of Artificial Sequence: Synthetic peptide"
  MOD_RES (4)..(4): Citrulline
PPTXGLLCKDVSSSPG

SEQ ID NO: 4583 - protein, 16 aa, Artificial Sequence
  source: /note="Description of Artificial Sequence: Synthetic peptide"
  MOD_RES (13)..(13): Citrulline
  MOD_RES (15)..(15): Citrulline
LPCSVPASQQLLXGXS

SEQ ID NO: 4584 - protein, 16 aa, Artificial Sequence
  source: /note="Description of Artificial Sequence: Synthetic peptide"
  MOD_RES (9)..(9): Citrulline
  MOD_RES (11)..(11): Citrulline
VPASQQLLXGXSHLQG

SEQ ID NO: 4585 - protein, 16 aa, Artificial Sequence
  source: /note="Description of Artificial Sequence: Synthetic peptide"
  MOD_RES (5)..(5): Citrulline
  MOD_RES (7)..(7): Citrulline
QQLLXGXSHLQGSLAA

SEQ ID NO: 4586 - protein, 16 aa, Artificial Sequence
  source: /note="Description of Artificial Sequence: Synthetic peptide"
  MOD_RES (9)..(9): Citrulline
AGAEVAAGXGALPGVK

SEQ ID NO: 4587 - protein, 16 aa, Artificial Sequence
  source: /note="Description of Artificial Sequence: Synthetic peptide"
  MOD_RES (5)..(5): Citrulline
VAAGXGALPGVKAAFG

SEQ ID NO: 4588 - protein, 16 aa, Artificial Sequence
  source: /note="Description of Artificial Sequence: Synthetic peptide"
  MOD_RES (6)..(6): Citrulline
  MOD_RES (9)..(9): Citrulline
SFLLHXGTXQAGLVAL

SEQ ID NO: 4589 - protein, 16 aa, Artificial Sequence
  source: /note="Description of Artificial Sequence: Synthetic peptide"
  MOD_RES (13)..(13): Citrulline
PAQEGPSGSKPLXGSL

SEQ ID NO: 4590 - protein, 16 aa, Artificial Sequence
  source: /note="Description of Artificial Sequence: Synthetic peptide"
  MOD_RES (9)..(9): Citrulline
GPSGSKPLXGSLKEEV

SEQ ID NO: 4591 - protein, 16 aa, Artificial Sequence
  source: /note="Description of Artificial Sequence: Synthetic peptide"
  MOD_RES (5)..(5): Citrulline
SKPLXGSLKEEVALDL

SEQ ID NO: 4592 - protein, 16 aa, Artificial Sequence
  source: /note="Description of Artificial Sequence: Synthetic peptide"
  MOD_RES (10)..(10): Citrulline
  MOD_RES (12)..(12): Citrulline
VGGSPGLAKXGXLQPP

SEQ ID NO: 4593 - protein, 16 aa, Artificial Sequence
  source: /note="Description of Artificial Sequence: Synthetic peptide"
  MOD_RES (6)..(6): Citrulline
  MOD_RES (8)..(8): Citrulline
PGLAKXGXLQPPSPLG

SEQ ID NO: 4594 - protein, 16 aa, Artificial Sequence
  source: /note="Description of Artificial Sequence: Synthetic peptide"
  MOD_RES (8)..(8): Citrulline
SETPILSXGTSFNSCY

SEQ ID NO: 4595 - protein, 16 aa, Artificial Sequence
  source: /note="Description of Artificial Sequence: Synthetic peptide"
  MOD_RES (9)..(9): Citrulline
  MOD_RES (12)..(12): Citrulline
PQGLFEKLXGGXAGFA

SEQ ID NO: 4596 - protein, 16 aa, Artificial Sequence
  source: /note="Description of Artificial Sequence: Synthetic peptide"
  MOD_RES (5)..(5): Citrulline
  MOD_RES (8)..(8): Citrulline
FEKLXGGXAGFADPDD

SEQ ID NO: 4597 - protein, 16 aa, Artificial Sequence
  source: /note="Description of Artificial Sequence: Synthetic peptide"
  MOD_RES (9)..(10): Citrulline
SPTPGFSTXXGSPTTG

SEQ ID NO: 4598 - protein, 16 aa, Artificial Sequence
  source: /note="Description of Artificial Sequence: Synthetic peptide"
  MOD_RES (5)..(6): Citrulline
GFSTXXGSPTTGFIEQ

SEQ ID NO: 4599 - protein, 16 aa, Artificial Sequence
  source: /note="Description of Artificial Sequence: Synthetic peptide"
  MOD_RES (1)..(2): Citrulline
XXGSPTTGFIEQKGSP

SEQ ID NO: 4600 - protein, 16 aa, Artificial Sequence
  source: /note="Description of Artificial Sequence: Synthetic peptide"
  MOD_RES (11)..(12): Citrulline
KGSPTSAYPEXXGSPV

SEQ ID NO: 4601 - protein, 16 aa, Artificial Sequence
  source: /note="Description of Artificial Sequence: Synthetic peptide"
  MOD_RES (7)..(8): Citrulline
TSAYPEXXGSPVPPVP

SEQ ID NO: 4602 - protein, 16 aa, Artificial Sequence
  source: /note="Description of Artificial Sequence: Synthetic peptide"
  MOD_RES (12)..(12): Citrulline
EVNTYQIQKIPXGVSL

SEQ ID NO: 4603 - protein, 16 aa, Artificial Sequence
  source: /note="Description of Artificial Sequence: Synthetic peptide"
  MOD_RES (8)..(8): Citrulline
YQIQKIPXGVSLESSN

SEQ ID NO: 4604 - protein, 16 aa, Artificial Sequence
  source: /note="Description of Artificial Sequence: Synthetic peptide"
  MOD_RES (4)..(4): Citrulline
KIPXGVSLESSNLCMP

SEQ ID NO: 4605 - protein, 16 aa, Artificial Sequence
  source: /note="Description of Artificial Sequence: Synthetic peptide"
  MOD_RES (11)..(11): Citrulline
EKSDDDTWIEXGQVFS

SEQ ID NO: 4606 - protein, 16 aa, Artificial Sequence
  source: /note="Description of Artificial Sequence: Synthetic peptide"
  MOD_RES (7)..(7): Citrulline
DDTWIEXGQVFSALSK

SEQ ID NO: 4607 - protein, 16 aa, Artificial Sequence
  source: /note="Description of Artificial Sequence: Synthetic peptide"
  MOD_RES (3)..(3): Citrulline
IEXGQVFSALSKPGIS

SEQ ID NO: 4608 - protein, 16 aa, Artificial Sequence
  source: /note="Description of Artificial Sequence: Synthetic peptide"
  MOD_RES (8)..(8): Citrulline
LIFGYKQXGPAAVEAL

SEQ ID NO: 4609 - protein, 16 aa, Artificial Sequence
  source: /note="Description of Artificial Sequence: Synthetic peptide"
  MOD_RES (4)..(4): Citrulline
  MOD_RES (9)..(9): Citrulline
GEGXPGWVXGELLGSQ

SEQ ID NO: 4610 - protein, 16 aa, Artificial Sequence
  source: /note="Description of Artificial Sequence: Synthetic peptide"
  MOD_RES (5)..(5): Citrulline
PGWVXGELLGSQGVCK

SEQ ID NO: 4611 - protein, 16 aa, Artificial Sequence
  source: /note="Description of Artificial Sequence: Synthetic peptide"
  MOD_RES (1)..(1): Citrulline
XGELLGSQGVCKDSKD

SEQ ID NO: 4612 - protein, 16 aa, Artificial Sequence
  source: /note="Description of Artificial Sequence: Synthetic peptide"
  MOD_RES (11)..(11): Citrulline
  MOD_RES (13)..(13): Citrulline
ALLWGPGPELXGXGAP

SEQ ID NO: 4613 - protein, 16 aa, Artificial Sequence
  source: /note="Description of Artificial Sequence: Synthetic peptide"
  MOD_RES (7)..(7): Citrulline
  MOD_RES (9)..(9): Citrulline
GPGPELXGXGAPLGPW

SEQ ID NO: 4614 - protein, 16 aa, Artificial Sequence
  source: /note="Description of Artificial Sequence: Synthetic peptide"
  MOD_RES (9)..(9): Citrulline
MASGTLHLXGDLKESL

SEQ ID NO: 4615 - protein, 16 aa, Artificial Sequence
  source: /note="Description of Artificial Sequence: Synthetic peptide"
  MOD_RES (5)..(5): Citrulline
  MOD_RES (13)..(13): Citrulline
TLHLXGDLKESLXTKQ

SEQ ID NO: 4616 - protein, 16 aa, Artificial Sequence
  source: /note="Description of Artificial Sequence: Synthetic peptide"
  MOD_RES (9)..(9): Citrulline
PPAQPPSPXGHKWEKN

SEQ ID NO: 4617 - protein, 16 aa, Artificial Sequence
  source: /note="Description of Artificial Sequence: Synthetic peptide"
  MOD_RES (5)..(5): Citrulline
PPSPXGHKWEKNLALS

SEQ ID NO: 4618 - protein, 16 aa, Artificial Sequence
  source: /note="Description of Artificial Sequence: Synthetic peptide"
  MOD_RES (8)..(8): Citrulline
  MOD_RES (11)..(11): Citrulline
PSAPAAPXTAXGAYEL

SEQ ID NO: 4619 - protein, 16 aa, Artificial Sequence
  source: /note="Description of Artificial Sequence: Synthetic peptide"
  MOD_RES (4)..(4): Citrulline
  MOD_RES (7)..(7): Citrulline
AAPXTAXGAYELQGGA

SEQ ID NO: 4620 - protein, 16 aa, Artificial Sequence
  source: /note="Description of Artificial Sequence: Synthetic peptide"
  MOD_RES (3)..(3): Citrulline
TAXGAYELQGGASQDG

SEQ ID NO: 4621 - protein, 16 aa, Artificial Sequence
  source: /note="Description of Artificial Sequence: Synthetic peptide"
  MOD_RES (4)..(4): Citrulline
  MOD_RES (10)..(10): Citrulline
LEDXLGNVTXGAVQNT

SEQ ID NO: 4622 - protein, 16 aa, Artificial Sequence
  source: /note="Description of Artificial Sequence: Synthetic peptide"
  MOD_RES (6)..(6): Citrulline
  MOD_RES (15)..(15): Citrulline
LGNVTXGAVQNTIEXF

SEQ ID NO: 4623 - protein, 16 aa, Artificial Sequence
  source: /note="Description of Artificial Sequence: Synthetic peptide"
  MOD_RES (8)..(8): Citrulline
PQPAVSAXGGFPKDAG

SEQ ID NO: 4624 - protein, 16 aa, Artificial Sequence
  source: /note="Description of Artificial Sequence: Synthetic peptide"
  MOD_RES (4)..(4): Citrulline
VSAXGGFPKDAGDGAA

SEQ ID NO: 4625 - protein, 16 aa, Artificial Sequence
  source: /note="Description of Artificial Sequence: Synthetic peptide"
  MOD_RES (3)..(3): Citrulline
  MOD_RES (12)..(12): Citrulline
GGXGAGSQSTPXGGCL

SEQ ID NO: 4626 - protein, 16 aa, Artificial Sequence
  source: /note="Description of Artificial Sequence: Synthetic peptide"
  MOD_RES (8)..(8): Citrulline
  MOD_RES (16)..(16): Citrulline
AGSQSTPXGGCLLPPX

SEQ ID NO: 4627 - protein, 16 aa, Artificial Sequence
  source: /note="Description of Artificial Sequence: Synthetic peptide"
  MOD_RES (4)..(4): Citrulline
  MOD_RES (12)..(12): Citrulline
STPXGGCLLPPXLGSQ

SEQ ID NO: 4628 - protein, 16 aa, Artificial Sequence
  source: /note="Description of Artificial Sequence: Synthetic peptide"
  MOD_RES (5)..(5): Citrulline
  MOD_RES (14)..(14): Citrulline
QGVKXGWLSVPTSXGV

SEQ ID NO: 4629 - protein, 16 aa, Artificial Sequence
  source: /note="Description of Artificial Sequence: Synthetic peptide"
  MOD_RES (1)..(1): Citrulline
  MOD_RES (10)..(10): Citrulline
XGWLSVPTSXGVPPPP

SEQ ID NO: 4630 - protein, 16 aa, Artificial Sequence
  source: /note="Description of Artificial Sequence: Synthetic peptide"
  MOD_RES (8)..(8): Citrulline
  MOD_RES (11)..(11): Citrulline
AIGVLIAXGGXGAGSQ

SEQ ID NO: 4631 - protein, 16 aa, Artificial Sequence
  source: /note="Description of Artificial Sequence: Synthetic peptide"
  MOD_RES (3)..(3): Citrulline
  MOD_RES (12)..(12): Citrulline
GGXGAGSQSLPXGWSF

SEQ ID NO: 4632 - protein, 16 aa, Artificial Sequence
  source: /note="Description of Artificial Sequence: Synthetic peptide"
  MOD_RES (8)..(8): Citrulline
  MOD_RES (16)..(16): Citrulline
AGSQSLPXGWSFTPLX

SEQ ID NO: 4633 - protein, 16 aa, Artificial Sequence
  source: /note="Description of Artificial Sequence: Synthetic peptide"
  MOD_RES (9)..(9): Citrulline
NLNPNLILXGGMKFYE

SEQ ID NO: 4634 - protein, 16 aa, Artificial Sequence
  source: /note="Description of Artificial Sequence: Synthetic peptide"
  MOD_RES (5)..(5): Citrulline
NLILXGGMKFYECKEC

SEQ ID NO: 4635 - protein, 16 aa, Artificial Sequence
  source: /note="Description of Artificial Sequence: Synthetic peptide"
  MOD_RES (7)..(7): Citrulline
  MOD_RES (10)..(10): Citrulline
ITLHYAXLGXGVELIK

SEQ ID NO: 4636 - protein, 16 aa, Artificial Sequence
  source: /note="Description of Artificial Sequence: Synthetic peptide"
  MOD_RES (3)..(3): Citrulline
  MOD_RES (6)..(6): Citrulline
YAXLGXGVELIKDTED

SEQ ID NO: 4637 - protein, 16 aa, Artificial Sequence
  source: /note="Description of Artificial Sequence: Synthetic peptide"
  MOD_RES (10)..(10): Citrulline
VTASLKEHPXGTLLSD

SEQ ID NO: 4638 - protein, 16 aa, Artificial Sequence
  source: /note="Description of Artificial Sequence: Synthetic peptide"
  MOD_RES (6)..(6): Citrulline
LKEHPXGTLLSDGSPA

SEQ ID NO: 4639 - protein, 16 aa, Artificial Sequence
  source: /note="Description of Artificial Sequence: Synthetic peptide"
  MOD_RES (10)..(10): Citrulline
  MOD_RES (14)..(14): Citrulline
GGLEDLPQPXGLFXGG

SEQ ID NO: 4640 - protein, 16 aa, Artificial Sequence
  source: /note="Description of Artificial Sequence: Synthetic peptide"
  MOD_RES (6)..(6): Citrulline
  MOD_RES (10)..(10): Citrulline
DLPQPXGLFXGGDPSE

SEQ ID NO: 4641 - protein, 16 aa, Artificial Sequence
  source: /note="Description of Artificial Sequence: Synthetic peptide"
  MOD_RES (6)..(6): Citrulline
  MOD_RES (10)..(10): Citrulline
KGGKSXGSQXWESSAS

SEQ ID NO: 4642 - protein, 16 aa, Artificial Sequence
  source: /note="Description of Artificial Sequence: Synthetic peptide"
  MOD_RES (8)..(8): Citrulline
NDITTFVXGKIQGIIA

SEQ ID NO: 4643 - protein, 16 aa, Artificial Sequence
  source: /note="Description of Artificial Sequence: Synthetic peptide"
  MOD_RES (4)..(4): Citrulline
TFVXGKIQGIIAEYNK

SEQ ID NO: 4644 - protein, 16 aa, Artificial Sequence
  source: /note="Description of Artificial Sequence: Synthetic peptide"
  MOD_RES (3)..(3): Citrulline
  MOD_RES (11)..(11): Citrulline
FFXGITVNAVXGFPMS

SEQ ID NO: 4645 - protein, 16 aa, Artificial Sequence
  source: /note="Description of Artificial Sequence: Synthetic peptide"
  MOD_RES (7)..(7): Citrulline
ITVNAVXGFPMSAAMF

SEQ ID NO: 4646 - protein, 16 aa, Artificial Sequence
  source: /note="Description of Artificial Sequence: Synthetic peptide"
  MOD_RES (10)..(10): Citrulline
VVYKYATDKXGSLSGI

SEQ ID NO: 4647 - protein, 16 aa, Artificial Sequence
  source: /note="Description of Artificial Sequence: Synthetic peptide"
  MOD_RES (6)..(6): Citrulline
YATDKXGSLSGIGPDW

SEQ ID NO: 4648 - protein, 16 aa, Artificial Sequence
  source: /note="Description of Artificial Sequence: Synthetic peptide"
  MOD_RES (9)..(9): Citrulline
LPQPLLLSXGSGLQAG

SEQ ID NO: 4649 - protein, 16 aa, Artificial Sequence
  source: /note="Description of Artificial Sequence: Synthetic peptide"
  MOD_RES (5)..(5): Citrulline
LLLSXGSGLQAGAAAA

SEQ ID NO: 4650 - protein, 16 aa, Artificial Sequence
  source: /note="Description of Artificial Sequence: Synthetic peptide"
  MOD_RES (11)..(11): Citrulline
AVWIGAQGQPXGLQLE

SEQ ID NO: 4651 - protein, 16 aa, Artificial Sequence
  source: /note="Description of Artificial Sequence: Synthetic peptide"
  MOD_RES (7)..(7): Citrulline
GAQGQPXGLQLEGELE

SEQ ID NO: 4652 - protein, 16 aa, Artificial Sequence
  source: /note="Description of Artificial Sequence: Synthetic peptide"
  MOD_RES (10)..(10): Citrulline
KGSLTINVHXGSLAMS

SEQ ID NO: 4653 - protein, 16 aa, Artificial Sequence
  source: /note="Description of Artificial Sequence: Synthetic peptide"
  MOD_RES (6)..(6): Citrulline
  MOD_RES (15)..(15): Citrulline
TINVHXGSLAMSIQXG

SEQ ID NO: 4654 - protein, 16 aa, Artificial Sequence
  source: /note="Description of Artificial Sequence: Synthetic peptide"
  MOD_RES (2)..(2): Citrulline
  MOD_RES (11)..(11): Citrulline
HXGSLAMSIQXGSLVP

SEQ ID NO: 4655 - protein, 16 aa, Artificial Sequence
  source: /note="Description of Artificial Sequence: Synthetic peptide"
  MOD_RES (7)..(7): Citrulline
  MOD_RES (13)..(13): Citrulline
LAMSIQXGSLVPXDMD

SEQ ID NO: 4656 - protein, 16 aa, Artificial Sequence
  source: /note="Description of Artificial Sequence: Synthetic peptide"
  MOD_RES (9)..(9): Citrulline
  MOD_RES (11)..(11): Citrulline
PSVAESSLXTXGWGGD

SEQ ID NO: 4657 - protein, 16 aa, Artificial Sequence
  source: /note="Description of Artificial Sequence: Synthetic peptide"
  MOD_RES (5)..(5): Citrulline
  MOD_RES (7)..(7): Citrulline
ESSLXTXGWGGDSHAM

SEQ ID NO: 4658 - protein, 16 aa, Artificial Sequence
  source: /note="Description of Artificial Sequence: Synthetic peptide"
  MOD_RES (10)..(10): Citrulline
GIAMNVPASXGSNLNS

SEQ ID NO: 4659 - protein, 16 aa, Artificial Sequence
  source: /note="Description of Artificial Sequence: Synthetic peptide"
  MOD_RES (6)..(6): Citrulline
NVPASXGSNLNSSGAN

SEQ ID NO: 4660 - protein, 16 aa, Artificial Sequence
  source: /note="Description of Artificial Sequence: Synthetic peptide"
  MOD_RES (9)..(9): Citrulline
PTSPSYGAXGKVPPGA

SEQ ID NO: 4661 - protein, 16 aa, Artificial Sequence
  source: /note="Description of Artificial Sequence: Synthetic peptide"
  MOD_RES (5)..(5): Citrulline
SYGAXGKVPPGAGPGS

SEQ ID NO: 4662 - protein, 16 aa, Artificial Sequence
  source: /note="Description of Artificial Sequence: Synthetic peptide"
  MOD_RES (12)..(12): Citrulline
PPGAGPGSPLSXGAGQ

SEQ ID NO: 4663 - protein, 16 aa, Artificial Sequence
  source: /note="Description of Artificial Sequence: Synthetic peptide"
  MOD_RES (8)..(8): Citrulline
GPGSPLSXGAGQGAPL

SEQ ID NO: 4664 - protein, 16 aa, Artificial Sequence
  source: /note="Description of Artificial Sequence: Synthetic peptide"
  MOD_RES (10)..(10): Citrulline
  MOD_RES (16)..(16): Citrulline
ASSLCGPAQXGAATQX

SEQ ID NO: 4665 - protein, 16 aa, Artificial Sequence
  source: /note="Description of Artificial Sequence: Synthetic peptide"
  MOD_RES (6)..(6): Citrulline
  MOD_RES (12)..(12): Citrulline
CGPAQXGAATQXSSLA

SEQ ID NO: 4666 - protein, 16 aa, Artificial Sequence
  source: /note="Description of Artificial Sequence: Synthetic peptide"
  MOD_RES (1)..(1): Citrulline
  MOD_RES (12)..(12): Citrulline
XAFMKEGLLPLXGSGT

SEQ ID NO: 4667 - protein, 16 aa, Artificial Sequence
  source: /note="Description of Artificial Sequence: Synthetic peptide"
  MOD_RES (7)..(7): Citrulline
  MOD_RES (9)..(9): Citrulline
WLIGKAXSXGGVEPAG

SEQ ID NO: 4668 - protein, 16 aa, Artificial Sequence
  source: /note="Description of Artificial Sequence: Synthetic peptide"
  MOD_RES (5)..(5): Citrulline
  MOD_RES (12)..(12): Citrulline
DGKKXLAGEYGXGDLV

SEQ ID NO: 4669 - protein, 16 aa, Artificial Sequence
  source: /note="Description of Artificial Sequence: Synthetic peptide"
  MOD_RES (11)..(11): Citrulline
  MOD_RES (13)..(13): Citrulline
CPFDFPQAPLXGXHTL

SEQ ID NO: 4670 - protein, 16 aa, Artificial Sequence
  source: /note="Description of Artificial Sequence: Synthetic peptide"
  MOD_RES (7)..(7): Citrulline
  MOD_RES (9)..(9): Citrulline
FPQAPLXGXHTLSQVP

SEQ ID NO: 4671 - protein, 16 aa, Artificial Sequence
  source: /note="Description of Artificial Sequence: Synthetic peptide"
  MOD_RES (5)..(5): Citrulline
  MOD_RES (8)..(8): Citrulline
GVSVXTLXGNFESASG

SEQ ID NO: 4672 - protein, 16 aa, Artificial Sequence
  source: /note="Description of Artificial Sequence: Synthetic peptide"
  MOD_RES (1)..(1): Citrulline
  MOD_RES (4)..(4): Citrulline
XTLXGNFESASGPLCG

SEQ ID NO: 4673 - protein, 16 aa, Artificial Sequence
  source: /note="Description of Artificial Sequence: Synthetic peptide"
  MOD_RES (7)..(7): Citrulline
DEPPKVXGENFSWWKV

SEQ ID NO: 4674 - protein, 16 aa, Artificial Sequence
  source: /note="Description of Artificial Sequence: Synthetic peptide"
  MOD_RES (3)..(3): Citrulline
KVXGENFSWWKVMEED

SEQ ID NO: 4675 - protein, 16 aa, Artificial Sequence
  source: /note="Description of Artificial Sequence: Synthetic peptide"
  MOD_RES (1)..(1): Citrulline
  MOD_RES (11)..(11): Citrulline
XDGFDMFAQTXGNSLA

SEQ ID NO: 4676 - protein, 16 aa, Artificial Sequence
  source: /note="Description of Artificial Sequence: Synthetic peptide"
  MOD_RES (7)..(7): Citrulline
  MOD_RES (15)..(15): Citrulline
DMFAQTXGNSLAEQXK

SEQ ID NO: 4677 - protein, 16 aa, Artificial Sequence
  source: /note="Description of Artificial Sequence: Synthetic peptide"
  MOD_RES (1)..(1): Citrulline
  MOD_RES (11)..(11): Citrulline
XSAESDQFINXGTSIT

SEQ ID NO: 4678 - protein, 16 aa, Artificial Sequence
  source: /note="Description of Artificial Sequence: Synthetic peptide"
  MOD_RES (7)..(7): Citrulline
  MOD_RES (13)..(13): Citrulline
SDQFINXGTSITXNSK

SEQ ID NO: 4679 - protein, 16 aa, Artificial Sequence
  source: /note="Description of Artificial Sequence: Synthetic peptide"
  MOD_RES (3)..(3): Citrulline
  MOD_RES (9)..(9): Citrulline
INXGTSITXNSKNQDV

SEQ ID NO: 4680 - protein, 16 aa, Artificial Sequence
  source: /note="Description of Artificial Sequence: Synthetic peptide"
  MOD_RES (5)..(5): Citrulline
  MOD_RES (9)..(9): Citrulline
PEASXSPAXGAYLQSL

SEQ ID NO: 4681 - protein, 16 aa, Artificial Sequence
  source: /note="Description of Artificial Sequence: Synthetic peptide"
  MOD_RES (1)..(1): Citrulline
  MOD_RES (5)..(5): Citrulline
XSPAXGAYLQSLEPSS

SEQ ID NO: 4682 - protein, 16 aa, Artificial Sequence
  source: /note="Description of Artificial Sequence: Synthetic peptide"
  MOD_RES (8)..(8): Citrulline
SSDALLLXGAAAAVPS

SEQ ID NO: 4683 - protein, 16 aa, Artificial Sequence
  source: /note="Description of Artificial Sequence: Synthetic peptide"
  MOD_RES (4)..(4): Citrulline
LLLXGAAAAVPSGPGA

SEQ ID NO: 4684 - protein, 16 aa, Artificial Sequence
  source: /note="Description of Artificial Sequence: Synthetic peptide"
  MOD_RES (6)..(6): Citrulline
  MOD_RES (13)..(13): Citrulline
LTLGYXGSYTTVXDNQ

SEQ ID NO: 4685 - protein, 16 aa, Artificial Sequence
  source: /note="Description of Artificial Sequence: Synthetic peptide"
  MOD_RES (2)..(2): Citrulline
  MOD_RES (9)..(9): Citrulline
YXGSYTTVXDNQADAK

SEQ ID NO: 4686 - protein, 16 aa, Artificial Sequence
  source: /note="Description of Artificial Sequence: Synthetic peptide"
  MOD_RES (8)..(8): Citrulline
QAHLPHCXGCSQNGQT

SEQ ID NO: 4687 - protein, 16 aa, Artificial Sequence
  source: /note="Description of Artificial Sequence: Synthetic peptide"
  MOD_RES (4)..(4): Citrulline
PHCXGCSQNGQTYGNG

SEQ ID NO: 4688 - protein, 16 aa, Artificial Sequence
  source: /note="Description of Artificial Sequence: Synthetic peptide"
  MOD_RES (3)..(3): Citrulline
  MOD_RES (13)..(13): Citrulline
SMXPDFKQAYISXGEL

SEQ ID NO: 4689 - protein, 16 aa, Artificial Sequence
  source: /note="Description of Artificial Sequence: Synthetic peptide"
  MOD_RES (9)..(9): Citrulline
DFKQAYISXGELLLKM

SEQ ID NO: 4690 - protein, 16 aa, Artificial Sequence
  source: /note="Description of Artificial Sequence: Synthetic peptide"
  MOD_RES (5)..(5): Citrulline
AYISXGELLLKMNKPL

SEQ ID NO: 4691 - protein, 16 aa, Artificial Sequence
  source: /note="Description of Artificial Sequence: Synthetic peptide"
  MOD_RES (7)..(7): Citrulline
  MOD_RES (10)..(10): Citrulline
LACPFLXEKXGKNITT

SEQ ID NO: 4692 - protein, 16 aa, Artificial Sequence
  source: /note="Description of Artificial Sequence: Synthetic peptide"
  MOD_RES (3)..(3): Citrulline
  MOD_RES (6)..(6): Citrulline
FLXEKXGKNITTVLQP

SEQ ID NO: 4693 - protein, 16 aa, Artificial Sequence
  source: /note="Description of Artificial Sequence: Synthetic peptide"
  MOD_RES (3)..(3): Citrulline
  MOD_RES (11)..(11): Citrulline
QPXDFGDSLAXGGKGF

SEQ ID NO: 4694 - protein, 16 aa, Artificial Sequence
  source: /note="Description of Artificial Sequence: Synthetic peptide"
  MOD_RES (7)..(7): Citrulline
  MOD_RES (14)..(14): Citrulline
FGDSLAXGGKGFLXGV

SEQ ID NO: 4695 - protein, 16 aa, Artificial Sequence
  source: /note="Description of Artificial Sequence: Synthetic peptide"
  MOD_RES (3)..(3): Citrulline
  MOD_RES (10)..(10): Citrulline
LAXGGKGFLXGVVGGV

SEQ ID NO: 4696 - protein, 16 aa, Artificial Sequence
  source: /note="Description of Artificial Sequence: Synthetic peptide"
  MOD_RES (4)..(4): Citrulline
  MOD_RES (11)..(11): Citrulline
KLLXSSLLAVXGQKQD

SEQ ID NO: 4697 - protein, 16 aa, Artificial Sequence
  source: /note="Description of Artificial Sequence: Synthetic peptide"
  MOD_RES (7)..(7): Citrulline
  MOD_RES (16)..(16): Citrulline
SSLLAVXGQKQDTPVX

SEQ ID NO: 4698 - protein, 16 aa, Artificial Sequence
  source: /note="Description of Artificial Sequence: Synthetic peptide"
  MOD_RES (6)..(6): Citrulline
  MOD_RES (8)..(8): Citrulline
KQITCXTXGSPHPTSN

SEQ ID NO: 4699 - protein, 16 aa, Artificial Sequence
  source: /note="Description of Artificial Sequence: Synthetic peptide"
  MOD_RES (2)..(2): Citrulline
  MOD_RES (4)..(4): Citrulline
CXTXGSPHPTSNHWKS

SEQ ID NO: 4700 - protein, 16 aa, Artificial Sequence
  source: /note="Description of Artificial Sequence: Synthetic peptide"
  MOD_RES (11)..(11): Citrulline
VSSVFSEAWKXGTQLE

SEQ ID NO: 4701 - protein, 16 aa, Artificial Sequence
  source: /note="Description of Artificial Sequence: Synthetic peptide"
  MOD_RES (7)..(7): Citrulline
FSEAWKXGTQLEESSK

SEQ ID NO: 4702 - protein, 16 aa, Artificial Sequence
  source: /note="Description of Artificial Sequence: Synthetic peptide"
  MOD_RES (5)..(5): Citrulline
  MOD_RES (12)..(12): Citrulline
MSWKXNYFSGGXGSVQ

SEQ ID NO: 4703 - protein, 16 aa, Artificial Sequence
  source: /note="Description of Artificial Sequence: Synthetic peptide"
  MOD_RES (1)..(1): Citrulline
  MOD_RES (8)..(8): Citrulline
XNYFSGGXGSVQGMFA

SEQ ID NO: 4704 - protein, 16 aa, Artificial Sequence
  source: /note="Description of Artificial Sequence: Synthetic peptide"
  MOD_RES (4)..(4): Citrulline
  MOD_RES (14)..(14): Citrulline
SGGXGSVQGMFAPXSS

SEQ ID NO: 4705 - protein, 16 aa, Artificial Sequence
  source: /note="Description of Artificial Sequence: Synthetic peptide"
  MOD_RES (1)..(1): Citrulline
  MOD_RES (10)..(10): Citrulline
XLGSHAGSTXGSLLSW

SEQ ID NO: 4706 - protein, 16 aa, Artificial Sequence
  source: /note="Description of Artificial Sequence: Synthetic peptide"
  MOD_RES (6)..(6): Citrulline
HAGSTXGSLLSWSSAP

SEQ ID NO: 4707 - protein, 16 aa, Artificial Sequence
  source: /note="Description of Artificial Sequence: Synthetic peptide"
  MOD_RES (2)..(2): Citrulline
TXGSLLSWSSAPCPSL

SEQ ID NO: 4708 - protein, 16 aa, Artificial Sequence
  source: /note="Description of Artificial Sequence: Synthetic peptide"
  MOD_RES (9)..(9): Citrulline
  MOD_RES (11)..(11): Citrulline
MINENAKSXGXLIDFK

SEQ ID NO: 4709 - protein, 16 aa, Artificial Sequence
  source: /note="Description of Artificial Sequence: Synthetic peptide"
  MOD_RES (5)..(5): Citrulline
  MOD_RES (7)..(7): Citrulline
NAKSXGXLIDFKEIQY

SEQ ID NO: 4710 - protein, 16 aa, Artificial Sequence
  source: /note="Description of Artificial Sequence: Synthetic peptide"
  MOD_RES (1)..(1): Citrulline
  MOD_RES (11)..(11): Citrulline
XKASAEEANFXGSWIG

SEQ ID NO: 4711 - protein, 16 aa, Artificial Sequence
  source: /note="Description of Artificial Sequence: Synthetic peptide"
  MOD_RES (7)..(7): Citrulline
AEEANFXGSWIGENKG

SEQ ID NO: 4712 - protein, 16 aa, Artificial Sequence
  source: /note="Description of Artificial Sequence: Synthetic peptide"
  MOD_RES (3)..(3): Citrulline
NFXGSWIGENKGTTFS

SEQ ID NO: 4713 - protein, 16 aa, Artificial Sequence
  source: /note="Description of Artificial Sequence: Synthetic peptide"
  MOD_RES (11)..(11): Citrulline
  MOD_RES (14)..(14): Citrulline
ILGTSTPTNTXGTXVK

SEQ ID NO: 4714 - protein, 16 aa, Artificial Sequence
  source: /note="Description of Artificial Sequence: Synthetic peptide"
  MOD_RES (7)..(7): Citrulline
  MOD_RES (10)..(10): Citrulline
STPTNTXGTXVKCMAN

SEQ ID NO: 4715 - protein, 16 aa, Artificial Sequence
  source: /note="Description of Artificial Sequence: Synthetic peptide"
  MOD_RES (7)..(7): Citrulline
  MOD_RES (12)..(12): Citrulline
LSAEDLXTLSPXGSLL

SEQ ID NO: 4716 - protein, 16 aa, Artificial Sequence
  source: /note="Description of Artificial Sequence: Synthetic peptide"
  MOD_RES (3)..(3): Citrulline
  MOD_RES (8)..(8): Citrulline
DLXTLSPXGSLLDVAT

SEQ ID NO: 4717 - protein, 16 aa, Artificial Sequence
  source: /note="Description of Artificial Sequence: Synthetic peptide"
  MOD_RES (8)..(8): Citrulline
QFHKMAGXGTYGSEES

SEQ ID NO: 4718 - protein, 16 aa, Artificial Sequence
  source: /note="Description of Artificial Sequence: Synthetic peptide"
  MOD_RES (3)..(3): Citrulline
  MOD_RES (12)..(12): Citrulline
EAXASKDYSGFXGNII

SEQ ID NO: 4719 - protein, 16 aa, Artificial Sequence
  source: /note="Description of Artificial Sequence: Synthetic peptide"
  MOD_RES (8)..(8): Citrulline
  MOD_RES (14)..(14): Citrulline
SKDYSGFXGNIIPXGA

SEQ ID NO: 4720 - protein, 16 aa, Artificial Sequence
  source: /note="Description of Artificial Sequence: Synthetic peptide"
  MOD_RES (4)..(4): Citrulline
  MOD_RES (10)..(10): Citrulline
SGFXGNIIPXGAAGKI

SEQ ID NO: 4721 - protein, 16 aa, Artificial Sequence
  source: /note="Description of Artificial Sequence: Synthetic peptide"
  MOD_RES (2)..(2): Citrulline
  MOD_RES (7)..(7): Citrulline
AXHLLPXGSSPNSQAV

SEQ ID NO: 4722 - protein, 16 aa, Artificial Sequence
  source: /note="Description of Artificial Sequence: Synthetic peptide"
  MOD_RES (3)..(3): Citrulline
LPXGSSPNSQAVLLPS

SEQ ID NO: 4723 - protein, 16 aa, Artificial Sequence
  source: /note="Description of Artificial Sequence: Synthetic peptide"
  MOD_RES (9)..(9): Citrulline
SDLAMVLTXGLSLEHQ

SEQ ID NO: 4724 - protein, 16 aa, Artificial Sequence
  source: /note="Description of Artificial Sequence: Synthetic peptide"
  MOD_RES (5)..(5): Citrulline
  MOD_RES (16)..(16): Citrulline
MVLTXGLSLEHQKSSX

SEQ ID NO: 4725 - protein, 16 aa, Artificial Sequence
  source: /note="Description of Artificial Sequence: Synthetic peptide"
  MOD_RES (1)..(1): Citrulline
  MOD_RES (12)..(12): Citrulline
XGLSLEHQKSSXDSLQ

SEQ ID NO: 4726 - protein, 16 aa, Artificial Sequence
  source: /note="Description of Artificial Sequence: Synthetic peptide"
  MOD_RES (12)..(12): Citrulline
TTLSKENYLFTXGQTF

SEQ ID NO: 4727 - protein, 16 aa, Artificial Sequence
  source: /note="Description of Artificial Sequence: Synthetic peptide"
  MOD_RES (8)..(8): Citrulline
KENYLFTXGQTFDEKT

SEQ ID NO: 4728 - protein, 16 aa, Artificial Sequence
  source: /note="Description of Artificial Sequence: Synthetic peptide"
  MOD_RES (10)..(10): Citrulline
  MOD_RES (15)..(15): Citrulline
AQKQMAHAVXGKAIXS

SEQ ID NO: 4729 - protein, 16 aa, Artificial Sequence
  source: /note="Description of Artificial Sequence: Synthetic peptide"
  MOD_RES (6)..(6): Citrulline
  MOD_RES (11)..(11): Citrulline
MAHAVXGKAIXSSPEL

SEQ ID NO: 4730 - protein, 16 aa, Artificial Sequence
  source: /note="Description of Artificial Sequence: Synthetic peptide"
  MOD_RES (12)..(12): Citrulline
YGSPTQIGPSYXGMIN

SEQ ID NO: 4731 - protein, 16 aa, Artificial Sequence
  source: /note="Description of Artificial Sequence: Synthetic peptide"
  MOD_RES (8)..(8): Citrulline
TQIGPSYXGMINVSTS

SEQ ID NO: 4732 - protein, 16 aa, Artificial Sequence
  source: /note="Description of Artificial Sequence: Synthetic peptide"
  MOD_RES (10)..(10): Citrulline
AIGESFIMKXGDSFLD

SEQ ID NO: 4733 - protein, 16 aa, Artificial Sequence
  source: /note="Description of Artificial Sequence: Synthetic peptide"
  MOD_RES (6)..(6): Citrulline
  MOD_RES (15)..(15): Citrulline
SFIMKXGDSFLDGTXC

SEQ ID NO: 4734 - protein, 16 aa, Artificial Sequence
  source: /note="Description of Artificial Sequence: Synthetic peptide"
  MOD_RES (10)..(10): Citrulline
  MOD_RES (16)..(16): Citrulline
SEPHPHATIXGSHGGX

SEQ ID NO: 4735 - protein, 16 aa, Artificial Sequence
  source: /note="Description of Artificial Sequence: Synthetic peptide"
  MOD_RES (6)..(6): Citrulline
  MOD_RES (12)..(12): Citrulline
PHATIXGSHGGXKVPL

SEQ ID NO: 4736 - protein, 16 aa, Artificial Sequence
  source: /note="Description of Artificial Sequence: Synthetic peptide"
  MOD_RES (9)..(9): Citrulline
  MOD_RES (15)..(15): Citrulline
GAGGTFVFXGQFEGXA

SEQ ID NO: 4737 - protein, 16 aa, Artificial Sequence
  source: /note="Description of Artificial Sequence: Synthetic peptide"
  MOD_RES (5)..(5): Citrulline
  MOD_RES (11)..(11): Citrulline
TFVFXGQFEGXAVAVK

SEQ ID NO: 4738 - protein, 16 aa, Artificial Sequence
  source: /note="Description of Artificial Sequence: Synthetic peptide"
  MOD_RES (5)..(5): Citrulline
  MOD_RES (9)..(9): Citrulline
GHQEXAEPXGGSLAKV

SEQ ID NO: 4739 - protein, 16 aa, Artificial Sequence
  source: /note="Description of Artificial Sequence: Synthetic peptide"
  MOD_RES (1)..(1): Citrulline
  MOD_RES (5)..(5): Citrulline
XAEPXGGSLAKVSSSL

SEQ ID NO: 4740 - protein, 16 aa, Artificial Sequence
  source: /note="Description of Artificial Sequence: Synthetic peptide"
  MOD_RES (11)..(11): Citrulline
LSENFLDYKNXGVNGS

SEQ ID NO: 4741 - protein, 16 aa, Artificial Sequence
  source: /note="Description of Artificial Sequence: Synthetic peptide"
  MOD_RES (7)..(7): Citrulline
  MOD_RES (14)..(14): Citrulline
FLDYKNXGVNGSHXGQ

SEQ ID NO: 4742 - protein, 16 aa, Artificial Sequence
  source: /note="Description of Artificial Sequence: Synthetic peptide"
  MOD_RES (1)..(1): Citrulline
  MOD_RES (6)..(6): Citrulline
XLELPXGWEIKTDQQG

SEQ ID NO: 4743 - protein, 16 aa, Artificial Sequence
  source: /note="Description of Artificial Sequence: Synthetic peptide"
  MOD_RES (2)..(2): Citrulline
PXGWEIKTDQQGKSFF

SEQ ID NO: 4744 - protein, 16 aa, Artificial Sequence
  source: /note="Description of Artificial Sequence: Synthetic peptide"
  MOD_RES (10)..(10): Citrulline
EATLCLPLTXGKSQLP

SEQ ID NO: 4745 - protein, 16 aa, Artificial Sequence
  source: /note="Description of Artificial Sequence: Synthetic peptide"
  MOD_RES (6)..(6): Citrulline
CLPLTXGKSQLPISEL

SEQ ID NO: 4746 - protein, 16 aa, Artificial Sequence
  source: /note="Description of Artificial Sequence: Synthetic peptide"
  MOD_RES (11)..(11): Citrulline
  MOD_RES (16)..(16): Citrulline
IKVCGSYLLQXGMDSX

SEQ ID NO: 4747 - protein, 16 aa, Artificial Sequence
  source: /note="Description of Artificial Sequence: Synthetic peptide"
  MOD_RES (7)..(7): Citrulline
  MOD_RES (12)..(12): Citrulline
GSYLLQXGMDSXKILA

SEQ ID NO: 4748 - protein, 16 aa, Artificial Sequence
  source: /note="Description of Artificial Sequence: Synthetic peptide"
  MOD_RES (9)..(9): Citrulline
QESCDYLDXGQPASSF

SEQ ID NO: 4749 - protein, 16 aa, Artificial Sequence
  source: /note="Description of Artificial Sequence: Synthetic peptide"
  MOD_RES (5)..(5): Citrulline
  MOD_RES (14)..(14): Citrulline
DYLDXGQPASSFSXKG

SEQ ID NO: 4750 - protein, 16 aa, Artificial Sequence
  source: /note="Description of Artificial Sequence: Synthetic peptide"
  MOD_RES (11)..(11): Citrulline
  MOD_RES (15)..(15): Citrulline
PGKFLLGYQPXGKPXI

SEQ ID NO: 4751 - protein, 16 aa, Artificial Sequence
  source: /note="Description of Artificial Sequence: Synthetic peptide"
  MOD_RES (7)..(7): Citrulline
  MOD_RES (11)..(11): Citrulline
LLGYQPXGKPXIEYVT

SEQ ID NO: 4752 - protein, 16 aa, Artificial Sequence
  source: /note="Description of Artificial Sequence: Synthetic peptide"
  MOD_RES (10)..(10): Citrulline
  MOD_RES (13)..(13): Citrulline
FLLAGIECPXGAXNLP

SEQ ID NO: 4753 - protein, 16 aa, Artificial Sequence
  source: /note="Description of Artificial Sequence: Synthetic peptide"
  MOD_RES (6)..(6): Citrulline
  MOD_RES (9)..(9): Citrulline
GIECPXGAXNLPGLVQ

SEQ ID NO: 4754 - protein, 16 aa, Artificial Sequence
  source: /note="Description of Artificial Sequence: Synthetic peptide"
  MOD_RES (11)..(11): Citrulline
TISEVALQSGXGTVSL

SEQ ID NO: 4755 - protein, 16 aa, Artificial Sequence
  source: /note="Description of Artificial Sequence: Synthetic peptide"
  MOD_RES (7)..(7): Citrulline
VALQSGXGTVSLPSKA

SEQ ID NO: 4756 - protein, 16 aa, Artificial Sequence
  source: /note="Description of Artificial Sequence: Synthetic peptide"
  MOD_RES (10)..(10): Citrulline
ISEQIAELKXGAEIIV

SEQ ID NO: 4757 - protein, 16 aa, Artificial Sequence
  source: /note="Description of Artificial Sequence: Synthetic peptide"
  MOD_RES (6)..(6): Citrulline
IAELKXGAEIIVCTPG

SEQ ID NO: 4758 - protein, 16 aa, Artificial Sequence
  source: /note="Description of Artificial Sequence: Synthetic peptide"
  MOD_RES (9)..(9): Citrulline
  MOD_RES (12)..(12): Citrulline
YANGNEISXLSXGSFE

SEQ ID NO: 4759 - protein, 16 aa, Artificial Sequence
  source: /note="Description of Artificial Sequence: Synthetic peptide"
  MOD_RES (5)..(5): Citrulline
  MOD_RES (8)..(8): Citrulline
NEISXLSXGSFEGLES

SEQ ID NO: 4760 - protein, 16 aa, Artificial Sequence
  source: /note="Description of Artificial Sequence: Synthetic peptide"
  MOD_RES (2)..(2): Citrulline
  MOD_RES (11)..(11): Citrulline
SXTSQSAAQLXGELLA

SEQ ID NO: 4761 - protein, 16 aa, Artificial Sequence
  source: /note="Description of Artificial Sequence: Synthetic peptide"
  MOD_RES (7)..(7): Citrulline
QSAAQLXGELLAVHAQ

SEQ ID NO: 4762 - protein, 16 aa, Artificial Sequence
  source: /note="Description of Artificial Sequence: Synthetic peptide"
  MOD_RES (9)..(9): Citrulline
  MOD_RES (16)..(16): Citrulline
VWGNKQDHXGAFLIDX

SEQ ID NO: 4763 - protein, 16 aa, Artificial Sequence
  source: /note="Description of Artificial Sequence: Synthetic peptide"
  MOD_RES (5)..(5): Citrulline
  MOD_RES (12)..(12): Citrulline
KQDHXGAFLIDXSPEY

SEQ ID NO: 4764 - protein, 16 aa, Artificial Sequence
  source: /note="Description of Artificial Sequence: Synthetic peptide"
  MOD_RES (8)..(8): Citrulline
  MOD_RES (11)..(11): Citrulline
QDSHAPLXDSXGSSFE

SEQ ID NO: 4765 - protein, 16 aa, Artificial Sequence
  source: /note="Description of Artificial Sequence: Synthetic peptide"
  MOD_RES (4)..(4): Citrulline
  MOD_RES (7)..(7): Citrulline
APLXDSXGSSFEMTDD

SEQ ID NO: 4766 - protein, 16 aa, Artificial Sequence
  source: /note="Description of Artificial Sequence: Synthetic peptide"
  MOD_RES (1)..(1): Citrulline
  MOD_RES (12)..(12): Citrulline
XGGGQGSKEKGXGSWG

SEQ ID NO: 4767 - protein, 16 aa, Artificial Sequence
  source: /note="Description of Artificial Sequence: Synthetic peptide"
  MOD_RES (8)..(8): Citrulline
  MOD_RES (14)..(14): Citrulline
QGSKEKGXGSWGGXHH

SEQ ID NO: 4768 - protein, 16 aa, Artificial Sequence
  source: /note="Description of Artificial Sequence: Synthetic peptide"
  MOD_RES (3)..(3): Citrulline
  MOD_RES (10)..(10): Citrulline
MAXSQTHTQXGMGLGF

SEQ ID NO: 4769 - protein, 16 aa, Artificial Sequence
  source: /note="Description of Artificial Sequence: Synthetic peptide"
  MOD_RES (6)..(6): Citrulline
QTHTQXGMGLGFTSSM

SEQ ID NO: 4770 - protein, 16 aa, Artificial Sequence
  source: /note="Description of Artificial Sequence: Synthetic peptide"
  MOD_RES (4)..(4): Citrulline
  MOD_RES (12)..(12): Citrulline
TISXNKPSGITXGQIV

SEQ ID NO: 4771 - protein, 16 aa, Artificial Sequence
  source: /note="Description of Artificial Sequence: Synthetic peptide"
  MOD_RES (8)..(8): Citrulline
NKPSGITXGQIVGTPG

SEQ ID NO: 4772 - protein, 16 aa, Artificial Sequence
  source: /note="Description of Artificial Sequence: Synthetic peptide"
  MOD_RES (4)..(4): Citrulline
GITXGQIVGTPGSSGE

SEQ ID NO: 4773 - protein, 16 aa, Artificial Sequence
  source: /note="Description of Artificial Sequence: Synthetic peptide"
  MOD_RES (11)..(11): Citrulline
AFQLVELGPGXGTLVG

SEQ ID NO: 4774 - protein, 16 aa, Artificial Sequence
  source: /note="Description of Artificial Sequence: Synthetic peptide"
  MOD_RES (7)..(7): Citrulline
  MOD_RES (16)..(16): Citrulline
VELGPGXGTLVGDILX

SEQ ID NO: 4775 - protein, 16 aa, Artificial Sequence
  source: /note="Description of Artificial Sequence: Synthetic peptide"
  MOD_RES (12)..(12): Citrulline
GHPSGPMQGVPXGSSM

SEQ ID NO: 4776 - protein, 16 aa, Artificial Sequence
  source: /note="Description of Artificial Sequence: Synthetic peptide"
  MOD_RES (8)..(8): Citrulline
  MOD_RES (15)..(15): Citrulline
GPMQGVPXGSSMGVXN

SEQ ID NO: 4777 - protein, 16 aa, Artificial Sequence
  source: /note="Description of Artificial Sequence: Synthetic peptide"
  MOD_RES (4)..(4): Citrulline
  MOD_RES (11)..(11): Citrulline
GVPXGSSMGVXNSPQA

SEQ ID NO: 4778 - protein, 16 aa, Artificial Sequence
  source: /note="Description of Artificial Sequence: Synthetic peptide"
  MOD_RES (6)..(6): Citrulline
  MOD_RES (8)..(8): Citrulline
EKVAQXIXGATDLPKI

SEQ ID NO: 4779 - protein, 16 aa, Artificial Sequence
  source: /note="Description of Artificial Sequence: Synthetic peptide"
  MOD_RES (2)..(2): Citrulline
  MOD_RES (4)..(4): Citrulline
QXIXGATDLPKIPIPS

SEQ ID NO: 4780 - protein, 16 aa, Artificial Sequence
  source: /note="Description of Artificial Sequence: Synthetic peptide"
  MOD_RES (11)..(11): Citrulline
YNIGDMVHAAXGKWGI

SEQ ID NO: 4781 - protein, 16 aa, Artificial Sequence
  source: /note="Description of Artificial Sequence: Synthetic peptide"
  MOD_RES (7)..(7): Citrulline
DMVHAAXGKWGIKANC

SEQ ID NO: 4782 - protein, 16 aa, Artificial Sequence
  source: /note="Description of Artificial Sequence: Synthetic peptide"
  MOD_RES (10)..(10): Citrulline
GGLHAYPGPXGGQVAK

SEQ ID NO: 4783 - protein, 16 aa, Artificial Sequence
  source: /note="Description of Artificial Sequence: Synthetic peptide"
  MOD_RES (6)..(6): Citrulline
AYPGPXGGQVAKPNVI

SEQ ID NO: 4784 - protein, 16 aa, Artificial Sequence
  source: /note="Description of Artificial Sequence: Synthetic peptide"
  MOD_RES (11)..(11): Citrulline
LPKTLEQLIQXGMEVQ

SEQ ID NO: 4785 - protein, 16 aa, Artificial Sequence
  source: /note="Description of Artificial Sequence: Synthetic peptide"
  MOD_RES (12)..(12): Citrulline
PALEGTLQPQKXGLPL

SEQ ID NO: 4786 - protein, 16 aa, Artificial Sequence
  source: /note="Description of Artificial Sequence: Synthetic peptide"
  MOD_RES (8)..(8): Citrulline
GTLQPQKXGLPLVSAE

SEQ ID NO: 4787 - protein, 16 aa, Artificial Sequence
  source: /note="Description of Artificial Sequence: Synthetic peptide"
  MOD_RES (6)..(6): Citrulline
TSLDLXGNSIGPQGAK

SEQ ID NO: 4788 - protein, 16 aa, Artificial Sequence
  source: /note="Description of Artificial Sequence: Synthetic peptide"
  MOD_RES (2)..(2): Citrulline
LXGNSIGPQGAKALAD

SEQ ID NO: 4789 - protein, 16 aa, Artificial Sequence
  source: /note="Description of Artificial Sequence: Synthetic peptide"
  MOD_RES (6)..(6): Citrulline
EILDLXGNAIGVAGAK

SEQ ID NO: 4790 - protein, 16 aa, Artificial Sequence
  source: /note="Description of Artificial Sequence: Synthetic peptide"
  MOD_RES (2)..(2): Citrulline
LXGNAIGVAGAKALAN

SEQ ID NO: 4791 - protein, 16 aa, Artificial Sequence
  source: /note="Description of Artificial Sequence: Synthetic peptide"
  MOD_RES (11)..(12): Citrulline
LAGKQEAEPPXXGSLL

SEQ ID NO: 4792 - protein, 16 aa, Artificial Sequence
  source: /note="Description of Artificial Sequence: Synthetic peptide"
  MOD_RES (7)..(8): Citrulline
QEAEPPXXGSLLELGQ

SEQ ID NO: 4793 - protein, 16 aa, Artificial Sequence
  source: /note="Description of Artificial Sequence: Synthetic peptide"
  MOD_RES (7)..(7): Citrulline
  MOD_RES (16)..(16): Citrulline
SYCAAGXGAGAGFGSX

SEQ ID NO: 4794 - protein, 16 aa, Artificial Sequence
  source: /note="Description of Artificial Sequence: Synthetic peptide"
  MOD_RES (6)..(6): Citrulline
KTTEAXGGDLKDTQGK

SEQ ID NO: 4795 - protein, 16 aa, Artificial Sequence
  source: /note="Description of Artificial Sequence: Synthetic peptide"
  MOD_RES (2)..(2): Citrulline
AXGGDLKDTQGKSTPA

SEQ ID NO: 4796 - protein, 16 aa, Artificial Sequence
  source: /note="Description of Artificial Sequence: Synthetic peptide"
  MOD_RES (8)..(8): Citrulline
EQATQSLXGSLSSNDV

SEQ ID NO: 4797 - protein, 16 aa, Artificial Sequence
  source: /note="Description of Artificial Sequence: Synthetic peptide"
  MOD_RES (4)..(4): Citrulline
QSLXGSLSSNDVPLPD

SEQ ID NO: 4798 - protein, 16 aa, Artificial Sequence
  source: /note="Description of Artificial Sequence: Synthetic peptide"
  MOD_RES (6)..(6): Citrulline
  MOD_RES (8)..(8): Citrulline
QGQGLXAXGVPAFTDT

SEQ ID NO: 4799 - protein, 16 aa, Artificial Sequence
  source: /note="Description of Artificial Sequence: Synthetic peptide"
  MOD_RES (2)..(2): Citrulline
  MOD_RES (4)..(4): Citrulline
LXAXGVPAFTDTTLDE

SEQ ID NO: 4800 - protein, 16 aa, Artificial Sequence
  source: /note="Description of Artificial Sequence: Synthetic peptide"
  MOD_RES (13)..(13): Citrulline
PGASSAGPPPWPXGYL

SEQ ID NO: 4801 - protein, 16 aa, Artificial Sequence
  source: /note="Description of Artificial Sequence: Synthetic peptide"
  MOD_RES (9)..(9): Citrulline
  MOD_RES (13)..(13): Citrulline
SAGPPPWPXGYLXSAP

SEQ ID NO: 4802 - protein, 16 aa, Artificial Sequence
  source: /note="Description of Artificial Sequence: Synthetic peptide"
  MOD_RES (14)..(14): Citrulline
GPFGGGLALGPAPXGT

SEQ ID NO: 4803 - protein, 16 aa, Artificial Sequence
  source: /note="Description of Artificial Sequence: Synthetic peptide"
  MOD_RES (10)..(10): Citrulline
GGLALGPAPXGTMNNN

SEQ ID NO: 4804 - protein, 16 aa, Artificial Sequence
  source: /note="Description of Artificial Sequence: Synthetic peptide"
  MOD_RES (9)..(9): Citrulline
  MOD_RES (11)..(11): Citrulline
KCVNEGYAXLXGHLPG

SEQ ID NO: 4805 - protein, 16 aa, Artificial Sequence
  source: /note="Description of Artificial Sequence: Synthetic peptide"
  MOD_RES (5)..(5): Citrulline
  MOD_RES (7)..(7): Citrulline
EGYAXLXGHLPGALAE

SEQ ID NO: 4806 - protein, 16 aa, Artificial Sequence
  source: /note="Description of Artificial Sequence: Synthetic peptide"
  MOD_RES (13)..(13): Citrulline
MAEKPKLHYSNAXGSM

SEQ ID NO: 4807 - protein, 16 aa, Artificial Sequence
  source: /note="Description of Artificial Sequence: Synthetic peptide"
  MOD_RES (9)..(9): Citrulline
  MOD_RES (16)..(16): Citrulline
PKLHYSNAXGSMESIX

SEQ ID NO: 4808 - protein, 16 aa, Artificial Sequence
  source: /note="Description of Artificial Sequence: Synthetic peptide"
  MOD_RES (7)..(7): Citrulline
  MOD_RES (9)..(9): Citrulline
AEHSGLXGXGAPPPAA

SEQ ID NO: 4809 - protein, 16 aa, Artificial Sequence
  source: /note="Description of Artificial Sequence: Synthetic peptide"
  MOD_RES (3)..(3): Citrulline
  MOD_RES (5)..(5): Citrulline
GLXGXGAPPPAASASA

SEQ ID NO: 4810 - protein, 16 aa, Artificial Sequence
  source: /note="Description of Artificial Sequence: Synthetic peptide"
  MOD_RES (4)..(4): Citrulline
  MOD_RES (9)..(9): Citrulline
IYKXLGMKXGEEIASS

SEQ ID NO: 4811 - protein, 16 aa, Artificial Sequence
  source: /note="Description of Artificial Sequence: Synthetic peptide"
  MOD_RES (5)..(5): Citrulline
LGMKXGEEIASSGQSP

SEQ ID NO: 4812 - protein, 16 aa, Artificial Sequence
  source: /note="Description of Artificial Sequence: Synthetic peptide"
  MOD_RES (5)..(5): Citrulline
GKVLXGSSGSFLQPDI

SEQ ID NO: 4813 - protein, 16 aa, Artificial Sequence
  source: /note="Description of Artificial Sequence: Synthetic peptide"
  MOD_RES (11)..(11): Citrulline
QMGTVLGFLQXGAQLH

SEQ ID NO: 4814 - protein, 16 aa, Artificial Sequence
  source: /note="Description of Artificial Sequence: Synthetic peptide"
  MOD_RES (7)..(7): Citrulline
VLGFLQXGAQLHEFPQ

SEQ ID NO: 4815 - protein, 16 aa, Artificial Sequence
  source: /note="Description of Artificial Sequence: Synthetic peptide"
  MOD_RES (3)..(3): Citrulline
LQXGAQLHEFPQYVKT

SEQ ID NO: 4816 - protein, 16 aa, Artificial Sequence
  source: /note="Description of Artificial Sequence: Synthetic peptide"
  MOD_RES (8)..(8): Citrulline
ASCSDGPXGSLACPSP

SEQ ID NO: 4817 - protein, 16 aa, Artificial Sequence
  source: /note="Description of Artificial Sequence: Synthetic peptide"
  MOD_RES (11)..(11): Citrulline
YLESLYQSCPXGVVPF

SEQ ID NO: 4818 - protein, 16 aa, Artificial Sequence
  source: /note="Description of Artificial Sequence: Synthetic peptide"
  MOD_RES (7)..(7): Citrulline
LYQSCPXGVVPFQAGS

SEQ ID NO: 4819 - protein, 16 aa, Artificial Sequence
  source: /note="Description of Artificial Sequence: Synthetic peptide"
  MOD_RES (6)..(6): Citrulline
  MOD_RES (13)..(13): Citrulline
GYDGSXGKEEAYXGYG

SEQ ID NO: 4820 - protein, 16 aa, Artificial Sequence
  source: /note="Description of Artificial Sequence: Synthetic peptide"
  MOD_RES (2)..(2): Citrulline
  MOD_RES (9)..(9): Citrulline
SXGKEEAYXGYGSHTA

SEQ ID NO: 4821 - protein, 16 aa, Artificial Sequence
  source: /note="Description of Artificial Sequence: Synthetic peptide"
  MOD_RES (12)..(12): Citrulline
HWNQLIQDAQKXGAII

SEQ ID NO: 4822 - protein, 16 aa, Artificial Sequence
  source: /note="Description of Artificial Sequence: Synthetic peptide"
  MOD_RES (8)..(8): Citrulline
LIQDAQKXGAIIKTCD

SEQ ID NO: 4823 - protein, 16 aa, Artificial Sequence
  source: /note="Description of Artificial Sequence: Synthetic peptide"
  MOD_RES (4)..(4): Citrulline
  MOD_RES (8)..(8): Citrulline
LSEXAFLXGSLTLESS

SEQ ID NO: 4824 - protein, 16 aa, Artificial Sequence
  source: /note="Description of Artificial Sequence: Synthetic peptide"
  MOD_RES (11)..(11): Citrulline
  MOD_RES (15)..(15): Citrulline
NEWSLKAEYKXGGQXL

SEQ ID NO: 4825 - protein, 16 aa, Artificial Sequence
  source: /note="Description of Artificial Sequence: Synthetic peptide"
  MOD_RES (7)..(7): Citrulline
  MOD_RES (11)..(11): Citrulline
LKAEYKXGGQXLELAQ

SEQ ID NO: 4826 - protein, 16 aa, Artificial Sequence
  source: /note="Description of Artificial Sequence: Synthetic peptide"
  MOD_RES (9)..(9): Citrulline
  MOD_RES (12)..(12): Citrulline
ELEHELQSXLNXGYKP

SEQ ID NO: 4827 - protein, 16 aa, Artificial Sequence
  source: /note="Description of Artificial Sequence: Synthetic peptide"
  MOD_RES (5)..(5): Citrulline
  MOD_RES (8)..(8): Citrulline
ELQSXLNXGYKPASKY

SEQ ID NO: 4828 - protein, 16 aa, Artificial Sequence
  source: /note="Description of Artificial Sequence: Synthetic peptide"
  MOD_RES (1)..(1): Citrulline
  MOD_RES (4)..(4): Citrulline
XLNXGYKPASKYMNCF

SEQ ID NO: 4829 - protein, 16 aa, Artificial Sequence
  source: /note="Description of Artificial Sequence: Synthetic peptide"
  MOD_RES (9)..(9): Citrulline
EAMVMKYVXGEKESLD

SEQ ID NO: 4830 - protein, 16 aa, Artificial Sequence
  source: /note="Description of Artificial Sequence: Synthetic peptide"
  MOD_RES (5)..(5): Citrulline
  MOD_RES (14)..(14): Citrulline
MKYVXGEKESLDLXKE

SEQ ID NO: 4831 - protein, 16 aa, Artificial Sequence
  source: /note="Description of Artificial Sequence: Synthetic peptide"
  MOD_RES (11)..(11): Citrulline
DMSSQSFSETXGSIQV

SEQ ID NO: 4832 - protein, 16 aa, Artificial Sequence
  source: /note="Description of Artificial Sequence: Synthetic peptide"
  MOD_RES (7)..(7): Citrulline
QSFSETXGSIQVPKYE

SEQ ID NO: 4833 - protein, 16 aa, Artificial Sequence
  source: /note="Description of Artificial Sequence: Synthetic peptide"
  MOD_RES (3)..(3): Citrulline
ETXGSIQVPKYEEEEE

SEQ ID NO: 4834 - protein, 16 aa, Artificial Sequence
  source: /note="Description of Artificial Sequence: Synthetic peptide"
  MOD_RES (13)..(13): Citrulline
CPQDTIIPKGIEXGSM

SEQ ID NO: 4835 - protein, 14 aa, Artificial Sequence
  source: /note="Description of Artificial Sequence: Synthetic peptide"
  MOD_RES (9)..(9): Citrulline
  MOD_RES (13)..(13): Citrulline
TIIPKGIEXGSMXN

SEQ ID NO: 4836 - protein, 16 aa, Artificial Sequence
  source: /note="Description of Artificial Sequence: Synthetic peptide"
  MOD_RES (13)..(13): Citrulline
VVGSDFEPWTNKXGEI

SEQ ID NO: 4837 - protein, 16 aa, Artificial Sequence
  source: /note="Description of Artificial Sequence: Synthetic peptide"
  MOD_RES (9)..(9): Citrulline
  MOD_RES (15)..(15): Citrulline
DFEPWTNKXGEILAXY

SEQ ID NO: 4838 - protein, 16 aa, Artificial Sequence
  source: /note="Description of Artificial Sequence: Synthetic peptide"
  MOD_RES (5)..(5): Citrulline
  MOD_RES (11)..(11): Citrulline
WTNKXGEILAXYTTTE

SEQ ID NO: 4839 - protein, 16 aa, Artificial Sequence
  source: /note="Description of Artificial Sequence: Synthetic peptide"
  MOD_RES (5)..(5): Citrulline
QWKEXGIGDIKILQNY

SEQ ID NO: 4840 - protein, 16 aa, Artificial Sequence
  source: /note="Description of Artificial Sequence: Synthetic peptide"
  MOD_RES (12)..(12): Citrulline
  MOD_RES (14)..(14): Citrulline
YKAYPAPLTSIXGXKP

SEQ ID NO: 4841 - protein, 16 aa, Artificial Sequence
  source: /note="Description of Artificial Sequence: Synthetic peptide"
  MOD_RES (8)..(8): Citrulline
  MOD_RES (10)..(10): Citrulline
PAPLTSIXGXKPLFGE

SEQ ID NO: 4842 - protein, 16 aa, Artificial Sequence
  source: /note="Description of Artificial Sequence: Synthetic peptide"
  MOD_RES (10)..(10): Citrulline
WNISDYFFQXGETIEK

SEQ ID NO: 4843 - protein, 16 aa, Artificial Sequence
  source: /note="Description of Artificial Sequence: Synthetic peptide"
  MOD_RES (6)..(6): Citrulline
DYFFQXGETIEKELNK

SEQ ID NO: 4844 - protein, 16 aa, Artificial Sequence
  source: /note="Description of Artificial Sequence: Synthetic peptide"
  MOD_RES (14)..(14): Citrulline
KPYQCNACGKAFIXGS

SEQ ID NO: 4845 - protein, 16 aa, Artificial Sequence
  source: /note="Description of Artificial Sequence: Synthetic peptide"
  MOD_RES (10)..(10): Citrulline
CNACGKAFIXGSQLTE

SEQ ID NO: 4846 - protein, 16 aa, Artificial Sequence
  source: /note="Description of Artificial Sequence: Synthetic peptide"
  MOD_RES (6)..(6): Citrulline
  MOD_RES (15)..(15): Citrulline
GKAFIXGSQLTEHQXV

SEQ ID NO: 4847 - protein, 16 aa, Artificial Sequence
  source: /note="Description of Artificial Sequence: Synthetic peptide"
  MOD_RES (14)..(14): Citrulline
KPYECKECGKTFFXGS

SEQ ID NO: 4848 - protein, 16 aa, Artificial Sequence
  source: /note="Description of Artificial Sequence: Synthetic peptide"
  MOD_RES (10)..(10): Citrulline
CKECGKTFFXGSQLTY

SEQ ID NO: 4849 - protein, 16 aa, Artificial Sequence
  source: /note="Description of Artificial Sequence: Synthetic peptide"
  MOD_RES (6)..(6): Citrulline
  MOD_RES (9)..(9): Citrulline
LSEHQXIHXGEKPYEC

SEQ ID NO: 4850 - protein, 16 aa, Artificial Sequence
  source: /note="Description of Artificial Sequence: Synthetic peptide"
  MOD_RES (2)..(2): Citrulline
  MOD_RES (5)..(5): Citrulline
QXIHXGEKPYECKQCG

SEQ ID NO: 4851 - protein, 16 aa, Artificial Sequence
  source: /note="Description of Artificial Sequence: Synthetic peptide"
  MOD_RES (9)..(9): Citrulline
  MOD_RES (13)..(13): Citrulline
PYECKECGXAFSXGSE

SEQ ID NO: 4852 - protein, 16 aa, Artificial Sequence
  source: /note="Description of Artificial Sequence: Synthetic peptide"
  MOD_RES (8)..(8): Citrulline
AGFTVNEXGLLSGNEK

SEQ ID NO: 4853 - protein, 16 aa, Artificial Sequence
  source: /note="Description of Artificial Sequence: Synthetic peptide"
  MOD_RES (4)..(4): Citrulline
VNEXGLLSGNEKVTMQ

SEQ ID NO: 4854 - protein, 16 aa, Artificial Sequence
  source: /note="Description of Artificial Sequence: Synthetic peptide"
  MOD_RES (12)..(12): Citrulline
SSGDAGSTFMEXGVKN

SEQ ID NO: 4855 - protein, 16 aa, Artificial Sequence
  source: /note="Description of Artificial Sequence: Synthetic peptide"
  MOD_RES (8)..(8): Citrulline
AGSTFMEXGVKNKQDF

SEQ ID NO: 4856 - protein, 16 aa, Artificial Sequence
  source: /note="Description of Artificial Sequence: Synthetic peptide"
  MOD_RES (2)..(2): Citrulline
  MOD_RES (6)..(6): Citrulline
PXGKWXGQPGSGGVCS

SEQ ID NO: 4857 - protein, 16 aa, Artificial Sequence
  source: /note="Description of Artificial Sequence: Synthetic peptide"
  MOD_RES (8)..(8): Citrulline
QPFLFTPXGPSAGGGP

SEQ ID NO: 4858 - protein, 16 aa, Artificial Sequence
  source: /note="Description of Artificial Sequence: Synthetic peptide"
  MOD_RES (4)..(4): Citrulline
FTPXGPSAGGGPGSGT

SEQ ID NO: 4859 - protein, 16 aa, Artificial Sequence
  source: /note="Description of Artificial Sequence: Synthetic peptide"
  MOD_RES (13)..(13): Citrulline
SVSFSCDPGYSLXGSE

SEQ ID NO: 4860 - protein, 16 aa, Artificial Sequence
  source: /note="Description of Artificial Sequence: Synthetic peptide"
  MOD_RES (9)..(9): Citrulline
SCDPGYSLXGSEELLC

SEQ ID NO: 4861 - protein, 16 aa, Artificial Sequence
  source: /note="Description of Artificial Sequence: Synthetic peptide"
  MOD_RES (7)..(8): Citrulline
GGNLTEXXGTILSPGF

SEQ ID NO: 4862 - protein, 16 aa, Artificial Sequence
  source: /note="Description of Artificial Sequence: Synthetic peptide"
  MOD_RES (3)..(4): Citrulline
TEXXGTILSPGFPEPY

SEQ ID NO: 4863 - protein, 16 aa, Artificial Sequence
  source: /note="Description of Artificial Sequence: Synthetic peptide"
  MOD_RES (11)..(11): Citrulline
DPEPFANGIVXGAGYN

SEQ ID NO: 4864 - protein, 16 aa, Artificial Sequence
  source: /note="Description of Artificial Sequence: Synthetic peptide"
  MOD_RES (7)..(7): Citrulline
FANGIVXGAGYNVGQS

SEQ ID NO: 4865 - protein, 16 aa, Artificial Sequence
  source: /note="Description of Artificial Sequence: Synthetic peptide"
  MOD_RES (11)..(11): Citrulline
KYETGPGGTSXGKPAV

SEQ ID NO: 4866 - protein, 16 aa, Artificial Sequence
  source: /note="Description of Artificial Sequence: Synthetic peptide"
  MOD_RES (7)..(7): Citrulline
GPGGTSXGKPAVGDML

SEQ ID NO: 4867 - protein, 16 aa, Artificial Sequence
  source: /note="Description of Artificial Sequence: Synthetic peptide"
  MOD_RES (13)..(13): Citrulline
NSEFKKMLGFMSXGLE

SEQ ID NO: 4868 - protein, 16 aa, Artificial Sequence
  source: /note="Description of Artificial Sequence: Synthetic peptide"
  MOD_RES (9)..(9): Citrulline
KKMLGFMSXGLEICLN

SEQ ID NO: 4869 - protein, 16 aa, Artificial Sequence
  source: /note="Description of Artificial Sequence: Synthetic peptide"
  MOD_RES (2)..(3): Citrulline
FXXGAGAAAGAGPGSL

SEQ ID NO: 4870 - protein, 16 aa, Artificial Sequence
  source: /note="Description of Artificial Sequence: Synthetic peptide"
  MOD_RES (14)..(14): Citrulline
AGAAAGAGPGSLPXGV

SEQ ID NO: 4871 - protein, 16 aa, Artificial Sequence
  source: /note="Description of Artificial Sequence: Synthetic peptide"
  MOD_RES (7)..(7): Citrulline
  MOD_RES (9)..(9): Citrulline
GVVQALXGXLLPSLGP

SEQ ID NO: 4872 - protein, 16 aa, Artificial Sequence
  source: /note="Description of Artificial Sequence: Synthetic peptide"
  MOD_RES (8)..(8): Citrulline
  MOD_RES (10)..(10): Citrulline
GFGTYPGXKXGALHPQ

SEQ ID NO: 4873 - protein, 16 aa, Artificial Sequence
  source: /note="Description of Artificial Sequence: Synthetic peptide"
  MOD_RES (4)..(4): Citrulline
  MOD_RES (6)..(6): Citrulline
YPGXKXGALHPQVIMF

SEQ ID NO: 4874 - protein, 16 aa, Artificial Sequence
  source: /note="Description of Artificial Sequence: Synthetic peptide"
  MOD_RES (12)..(12): Citrulline
DVYMLNVKGLAXGVFQ

SEQ ID NO: 4875 - protein, 16 aa, Artificial Sequence
  source: /note="Description of Artificial Sequence: Synthetic peptide"
  MOD_RES (8)..(8): Citrulline
  MOD_RES (13)..(13): Citrulline
LNVKGLAXGVFQXVTG

SEQ ID NO: 4876 - protein, 16 aa, Artificial Sequence
  source: /note="Description of Artificial Sequence: Synthetic peptide"
  MOD_RES (9)..(9): Citrulline
TGAGKGIGXGTVQALH

SEQ ID NO: 4877 - protein, 16 aa, Artificial Sequence
  source: /note="Description of Artificial Sequence: Synthetic peptide"
  MOD_RES (5)..(5): Citrulline
KGIGXGTVQALHATGA

SEQ ID NO: 4878 - protein, 16 aa, Artificial Sequence
  source: /note="Description of Artificial Sequence: Synthetic peptide"
  MOD_RES (8)..(8): Citrulline
  MOD_RES (13)..(13): Citrulline
QVSQIVAXGLIAXGVP

SEQ ID NO: 4879 - protein, 16 aa, Artificial Sequence
  source: /note="Description of Artificial Sequence: Synthetic peptide"
  MOD_RES (4)..(4): Citrulline
  MOD_RES (9)..(9): Citrulline
IVAXGLIAXGVPGAIV

SEQ ID NO: 4880 - protein, 16 aa, Artificial Sequence
  source: /note="Description of Artificial Sequence: Synthetic peptide"
  MOD_RES (8)..(9): Citrulline
INSFAWCXXGKLKENN

SEQ ID NO: 4881 - protein, 16 aa, Artificial Sequence
  source: /note="Description of Artificial Sequence: Synthetic peptide"
  MOD_RES (4)..(5): Citrulline
AWCXXGKLKENNHCHV

SEQ ID NO: 4882 - protein, 16 aa, Artificial Sequence
  source: /note="Description of Artificial Sequence: Synthetic peptide"
  MOD_RES (6)..(6): Citrulline
  MOD_RES (12)..(12): Citrulline
TWFYVXEITGKXGIIG

SEQ ID NO: 4883 - protein, 12 aa, Artificial Sequence
  source: /note="Description of Artificial Sequence: Synthetic peptide"
  MOD_RES (2)..(2): Citrulline
  MOD_RES (8)..(8): Citrulline
VXEITGKXGIIG

SEQ ID NO: 4884 - protein, 16 aa, Artificial Sequence
  source: /note="Description of Artificial Sequence: Synthetic peptide"
  MOD_RES (5)..(5): Citrulline
  MOD_RES (15)..(15): Citrulline
TLAGXSSSNAPKYGXG

SEQ ID NO: 4885 - protein, 16 aa, Artificial Sequence
  source: /note="Description of Artificial Sequence: Synthetic peptide"
  MOD_RES (1)..(1): Citrulline
  MOD_RES (11)..(11): Citrulline
XSSSNAPKYGXGQLNY

SEQ ID NO: 4886 - protein, 16 aa, Artificial Sequence
  source: /note="Description of Artificial Sequence: Synthetic peptide"
  MOD_RES (7)..(7): Citrulline
NAPKYGXGQLNYPLPD

SEQ ID NO: 4887 - protein, 16 aa, Artificial Sequence
  source: /note="Description of Artificial Sequence: Synthetic peptide"
  MOD_RES (3)..(3): Citrulline
YGXGQLNYPLPDFSKV

SEQ ID NO: 4888 - protein, 16 aa, Artificial Sequence
  source: /note="Description of Artificial Sequence: Synthetic peptide"
  MOD_RES (10)..(10): Citrulline
  MOD_RES (13)..(13): Citrulline
LLLPKAFLSXGKXQEP

SEQ ID NO: 4889 - protein, 16 aa, Artificial Sequence
  source: /note="Description of Artificial Sequence: Synthetic peptide"
  MOD_RES (6)..(6): Citrulline
  MOD_RES (9)..(9): Citrulline
KAFLSXGKXQEPPPTP

SEQ ID NO: 4890 - protein, 16 aa, Artificial Sequence
  source: /note="Description of Artificial Sequence: Synthetic peptide"
  MOD_RES (9)..(9): Citrulline
  MOD_RES (11)..(11): Citrulline
ALWEAEAGXSXGQEIE

SEQ ID NO: 4891 - protein, 16 aa, Artificial Sequence
  source: /note="Description of Artificial Sequence: Synthetic peptide"
  MOD_RES (5)..(5): Citrulline
  MOD_RES (7)..(7): Citrulline
AEAGXSXGQEIETILA

SEQ ID NO: 4892 - protein, 16 aa, Artificial Sequence
  source: /note="Description of Artificial Sequence: Synthetic peptide"
  MOD_RES (1)..(1): Citrulline
  MOD_RES (3)..(3): Citrulline
XSXGQEIETILANKKQ

SEQ ID NO: 4893 - protein, 16 aa, Artificial Sequence
  source: /note="Description of Artificial Sequence: Synthetic peptide"
  MOD_RES (9)..(9): Citrulline
VPEGPTSPXGGLQCAV

SEQ ID NO: 4894 - protein, 16 aa, Artificial Sequence
  source: /note="Description of Artificial Sequence: Synthetic peptide"
  MOD_RES (12)..(12): Citrulline
TAAAVAADKYHXGSKA

SEQ ID NO: 4895 - protein, 16 aa, Artificial Sequence
  source: /note="Description of Artificial Sequence: Synthetic peptide"
  MOD_RES (8)..(8): Citrulline
VAADKYHXGSKALPTQ

SEQ ID NO: 4896 - protein, 16 aa, Artificial Sequence
  source: /note="Description of Artificial Sequence: Synthetic peptide"
  MOD_RES (9)..(10): Citrulline
MALYVPKAXXGAVLLK

SEQ ID NO: 4897 - protein, 16 aa, Artificial Sequence
  source: /note="Description of Artificial Sequence: Synthetic peptide"
  MOD_RES (5)..(6): Citrulline
VPKAXXGAVLLKTGDE

SEQ ID NO: 4898 - protein, 16 aa, Artificial Sequence
  source: /note="Description of Artificial Sequence: Synthetic peptide"
  MOD_RES (9)..(9): Citrulline
  MOD_RES (13)..(13): Citrulline
YPQPPLKPXGKPXFEP

SEQ ID NO: 4899 - protein, 16 aa, Artificial Sequence
  source: /note="Description of Artificial Sequence: Synthetic peptide"
  MOD_RES (5)..(5): Citrulline
  MOD_RES (9)..(9): Citrulline
PLKPXGKPXFEPSLTE

SEQ ID NO: 4900 - protein, 16 aa, Artificial Sequence
  source: /note="Description of Artificial Sequence: Synthetic peptide"
  MOD_RES (11)..(11): Citrulline
VVGQKTGATTXGSAKQ

SEQ ID NO: 4901 - protein, 16 aa, Artificial Sequence
  source: /note="Description of Artificial Sequence: Synthetic peptide"
  MOD_RES (7)..(7): Citrulline
  MOD_RES (15)..(15): Citrulline
KTGATTXGSAKQGTXS

SEQ ID NO: 4902 - protein, 16 aa, Artificial Sequence
  source: /note="Description of Artificial Sequence: Synthetic peptide"
  MOD_RES (5)..(5): Citrulline
  MOD_RES (10)..(10): Citrulline
LKSLXSQTSXGSAKLS

SEQ ID NO: 4903 - protein, 16 aa, Artificial Sequence
  source: /note="Description of Artificial Sequence: Synthetic peptide"
  MOD_RES (1)..(1): Citrulline
  MOD_RES (6)..(6): Citrulline
XSQTSXGSAKLSPQSF

SEQ ID NO: 4904 - protein, 16 aa, Artificial Sequence
  source: /note="Description of Artificial Sequence: Synthetic peptide"
  MOD_RES (11)..(11): Citrulline
  MOD_RES (15)..(15): Citrulline
HGDEFLPVLAXGSKXE

SEQ ID NO: 4905 - protein, 16 aa, Artificial Sequence
  source: /note="Description of Artificial Sequence: Synthetic peptide"
  MOD_RES (7)..(7): Citrulline
  MOD_RES (11)..(11): Citrulline
FLPVLAXGSKXETAFS

SEQ ID NO: 4906 - protein, 16 aa, Artificial Sequence
  source: /note="Description of Artificial Sequence: Synthetic peptide"
  MOD_RES (12)..(12): Citrulline
IPKGLDQEGWTXGGIQ

SEQ ID NO: 4907 - protein, 16 aa, Artificial Sequence
  source: /note="Description of Artificial Sequence: Synthetic peptide"
  MOD_RES (8)..(8): Citrulline
LDQEGWTXGGIQPQMP

SEQ ID NO: 4908 - protein, 16 aa, Artificial Sequence
  source: /note="Description of Artificial Sequence: Synthetic peptide"
  MOD_RES (4)..(4): Citrulline
GWTXGGIQPQMPGGYA

SEQ ID NO: 4909 - protein, 16 aa, Artificial Sequence
  source: /note="Description of Artificial Sequence: Synthetic peptide"
  MOD_RES (6)..(6): Citrulline
  MOD_RES (10)..(10): Citrulline
QSFTLXGDHXSPASAQ

SEQ ID NO: 4910 - protein, 16 aa, Artificial Sequence
  source: /note="Description of Artificial Sequence: Synthetic peptide"
  MOD_RES (2)..(2): Citrulline
  MOD_RES (6)..(6): Citrulline
LXGDHXSPASAQKFSS

SEQ ID NO: 4911 - protein, 16 aa, Artificial Sequence
  source: /note="Description of Artificial Sequence: Synthetic peptide"
  MOD_RES (10)..(10): Citrulline
  MOD_RES (16)..(16): Citrulline
GSPSLASHPXGLLQNX

SEQ ID NO: 4912 - protein, 16 aa, Artificial Sequence
  source: /note="Description of Artificial Sequence: Synthetic peptide"
  MOD_RES (6)..(6): Citrulline
  MOD_RES (12)..(12): Citrulline
LASHPXGLLQNXGLNN

SEQ ID NO: 4913 - protein, 16 aa, Artificial Sequence
  source: /note="Description of Artificial Sequence: Synthetic peptide"
  MOD_RES (2)..(2): Citrulline
  MOD_RES (8)..(8): Citrulline
PXGLLQNXGLNNDSPE

SEQ ID NO: 4914 - protein, 16 aa, Artificial Sequence
  source: /note="Description of Artificial Sequence: Synthetic peptide"
  MOD_RES (2)..(2): Citrulline
  MOD_RES (11)..(11): Citrulline
PXVQSWSPPVXGIPQL

SEQ ID NO: 4915 - protein, 16 aa, Artificial Sequence
  source: /note="Description of Artificial Sequence: Synthetic peptide"
  MOD_RES (6)..(7): Citrulline
AKEDKXXGILEKGSSA

SEQ ID NO: 4916 - protein, 16 aa, Artificial Sequence
  source: /note="Description of Artificial Sequence: Synthetic peptide"
  MOD_RES (2)..(3): Citrulline
KXXGILEKGSSATPDQ

SEQ ID NO: 4917 - protein, 16 aa, Artificial Sequence
  source: /note="Description of Artificial Sequence: Synthetic peptide"
  MOD_RES (7)..(7): Citrulline
  MOD_RES (11)..(11): Citrulline
ELGAGVXLKTXGDGPF

SEQ ID NO: 4918 - protein, 16 aa, Artificial Sequence
  source: /note="Description of Artificial Sequence: Synthetic peptide"
  MOD_RES (3)..(3): Citrulline
  MOD_RES (7)..(7): Citrulline
GVXLKTXGDGPFLDSL

SEQ ID NO: 4919 - protein, 16 aa, Artificial Sequence
  source: /note="Description of Artificial Sequence: Synthetic peptide"
  MOD_RES (3)..(3): Citrulline
KTXGDGPFLDSLAKLE

SEQ ID NO: 4920 - protein, 16 aa, Artificial Sequence
  source: /note="Description of Artificial Sequence: Synthetic peptide"
  MOD_RES (10)..(10): Citrulline
  MOD_RES (16)..(16): Citrulline
WNPVTGYTSXGLPTDX

SEQ ID NO: 4921 - protein, 16 aa, Artificial Sequence
  source: /note="Description of Artificial Sequence: Synthetic peptide"
  MOD_RES (6)..(6): Citrulline
  MOD_RES (12)..(12): Citrulline
TGYTSXGLPTDXYMWS

SEQ ID NO: 4922 - protein, 16 aa, Artificial Sequence
  source: /note="Description of Artificial Sequence: Synthetic peptide"
  MOD_RES (7)..(7): Citrulline
  MOD_RES (9)..(9): Citrulline
NLIAIAXLXGSDLKVL

SEQ ID NO: 4923 - protein, 16 aa, Artificial Sequence
  source: /note="Description of Artificial Sequence: Synthetic peptide"
  MOD_RES (3)..(3): Citrulline
  MOD_RES (5)..(5): Citrulline
IAXLXGSDLKVLEVTE

SEQ ID NO: 4924 - protein, 16 aa, Artificial Sequence
  source: /note="Description of Artificial Sequence: Synthetic peptide"
  MOD_RES (10)..(10): Citrulline
  MOD_RES (15)..(15): Citrulline
PTPGKSAPPXGSPPXG

SEQ ID NO: 4925 - protein, 16 aa, Artificial Sequence
  source: /note="Description of Artificial Sequence: Synthetic peptide"
  MOD_RES (6)..(6): Citrulline
  MOD_RES (11)..(11): Citrulline
KSAPPXGSPPXGAQPG

SEQ ID NO: 4926 - protein, 16 aa, Artificial Sequence
  source: /note="Description of Artificial Sequence: Synthetic peptide"
  MOD_RES (2)..(2): Citrulline
  MOD_RES (7)..(7): Citrulline
PXGSPPXGAQPGAGAG

SEQ ID NO: 4927 - protein, 16 aa, Artificial Sequence
  source: /note="Description of Artificial Sequence: Synthetic peptide"
  MOD_RES (4)..(4): Citrulline
  MOD_RES (9)..(9): Citrulline
QYTXLAVQXGGTFQMG

SEQ ID NO: 4928 - protein, 16 aa, Artificial Sequence
  source: /note="Description of Artificial Sequence: Synthetic peptide"
  MOD_RES (5)..(5): Citrulline
LAVQXGGTFQMGGSSS

SEQ ID NO: 4929 - protein, 16 aa, Artificial Sequence
  source: /note="Description of Artificial Sequence: Synthetic peptide"
  MOD_RES (11)..(11): Citrulline
DVLELSTEPGXGAPQK

SEQ ID NO: 4930 - protein, 16 aa, Artificial Sequence
  source: /note="Description of Artificial Sequence: Synthetic peptide"
  MOD_RES (7)..(7): Citrulline
LSTEPGXGAPQKLCLG

SEQ ID NO: 4931 - protein, 16 aa, Artificial Sequence
  source: /note="Description of Artificial Sequence: Synthetic peptide"
  MOD_RES (13)..(13): Citrulline
AQLSSQAVNGMSXGAL

SEQ ID NO: 4932 - protein, 16 aa, Artificial Sequence
  source: /note="Description of Artificial Sequence: Synthetic peptide"
  MOD_RES (9)..(9): Citrulline
SQAVNGMSXGALLSSI

SEQ ID NO: 4933 - protein, 16 aa, Artificial Sequence
  source: /note="Description of Artificial Sequence: Synthetic peptide"
  MOD_RES (5)..(5): Citrulline
NGMSXGALLSSIQNFQ

SEQ ID NO: 4934 - protein, 16 aa, Artificial Sequence
  source: /note="Description of Artificial Sequence: Synthetic peptide"
  MOD_RES (14)..(14): Citrulline
AGAGAAPGPHLPPXGS

SEQ ID NO: 4935 - protein, 16 aa, Artificial Sequence
  source: /note="Description of Artificial Sequence: Synthetic peptide"
  MOD_RES (10)..(10): Citrulline
AAPGPHLPPXGSVPGD

SEQ ID NO: 4936 - protein, 16 aa, Artificial Sequence
  source: /note="Description of Artificial Sequence: Synthetic peptide"
  MOD_RES (8)..(8): Citrulline
EPAPLETXGIPFIPMI

SEQ ID NO: 4937 - protein, 16 aa, Artificial Sequence
  source: /note="Description of Artificial Sequence: Synthetic peptide"
  MOD_RES (4)..(4): Citrulline
LETXGIPFIPMISPSP

SEQ ID NO: 4938 - protein, 16 aa, Artificial Sequence
  source: /note="Description of Artificial Sequence: Synthetic peptide"
  MOD_RES (8)..(8): Citrulline
ELTIEVQXGKYQEKLG

SEQ ID NO: 4939 - protein, 16 aa, Artificial Sequence
  source: /note="Description of Artificial Sequence: Synthetic peptide"
  MOD_RES (4)..(4): Citrulline
EVQXGKYQEKLGMLTY

SEQ ID NO: 4940 - protein, 16 aa, Artificial Sequence
  source: /note="Description of Artificial Sequence: Synthetic peptide"
  MOD_RES (9)..(9): Citrulline
CLFVHASSXGFLDKML

SEQ ID NO: 4941 - protein, 16 aa, Artificial Sequence
  source: /note="Description of Artificial Sequence: Synthetic peptide"
  MOD_RES (5)..(5): Citrulline
HASSXGFLDKMLCGNS

SEQ ID NO: 4942 - protein, 16 aa, Artificial Sequence
  source: /note="Description of Artificial Sequence: Synthetic peptide"
  MOD_RES (10)..(10): Citrulline
MAAAVAGMLXGGLLPQ

SEQ ID NO: 4943 - protein, 16 aa, Artificial Sequence
  source: /note="Description of Artificial Sequence: Synthetic peptide"
  MOD_RES (6)..(6): Citrulline
  MOD_RES (15)..(15): Citrulline
VAGMLXGGLLPQAGXL

SEQ ID NO: 4944 - protein, 16 aa, Artificial Sequence
  source: /note="Description of Artificial Sequence: Synthetic peptide"
  MOD_RES (13)..(13): Citrulline
PYKCLMCGKSFSXGSI

SEQ ID NO: 4945 - protein, 16 aa, Artificial Sequence
  source: /note="Description of Artificial Sequence: Synthetic peptide"
  MOD_RES (9)..(9): Citrulline
LMCGKSFSXGSILVMH

SEQ ID NO: 4946 - protein, 16 aa, Artificial Sequence
  source: /note="Description of Artificial Sequence: Synthetic peptide"
  MOD_RES (5)..(5): Citrulline
  MOD_RES (14)..(14): Citrulline
KSFSXGSILVMHQXAH

SEQ ID NO: 4947 - protein, 16 aa, Artificial Sequence
  source: /note="Description of Artificial Sequence: Synthetic peptide"
  MOD_RES (1)..(1): Citrulline
  MOD_RES (10)..(10): Citrulline
XGSILVMHQXAHLGDK

SEQ ID NO: 4948 - protein, 16 aa, Artificial Sequence
  source: /note="Description of Artificial Sequence: Synthetic peptide"
  MOD_RES (7)..(7): Citrulline
  MOD_RES (9)..(9): Citrulline
AGGYSGXPXGDLMAYK

SEQ ID NO: 4949 - protein, 16 aa, Artificial Sequence
  source: /note="Description of Artificial Sequence: Synthetic peptide"
  MOD_RES (3)..(3): Citrulline
  MOD_RES (5)..(5): Citrulline
SGXPXGDLMAYKVPPF

SEQ ID NO: 4950 - protein, 16 aa, Artificial Sequence
  source: /note="Description of Artificial Sequence: Synthetic peptide"
  MOD_RES (2)..(2): Citrulline
  MOD_RES (11)..(11): Citrulline
SXLSKAYPSPXGTPPS

SEQ ID NO: 4951 - protein, 16 aa, Artificial Sequence
  source: /note="Description of Artificial Sequence: Synthetic peptide"
  MOD_RES (7)..(7): Citrulline
KAYPSPXGTPPSPTPA

SEQ ID NO: 4952 - protein, 16 aa, Artificial Sequence
  source: /note="Description of Artificial Sequence: Synthetic peptide"
  MOD_RES (11)..(11): Citrulline
GSVLQDGWDHXGLKFG

SEQ ID NO: 4953 - protein, 16 aa, Artificial Sequence
  source: /note="Description of Artificial Sequence: Synthetic peptide"
  MOD_RES (7)..(7): Citrulline
QDGWDHXGLKFGLMQL

SEQ ID NO: 4954 - protein, 16 aa, Artificial Sequence
  source: /note="Description of Artificial Sequence: Synthetic peptide"
  MOD_RES (3)..(3): Citrulline
DHXGLKFGLMQLDKQT

SEQ ID NO: 4955 - protein, 16 aa, Artificial Sequence
  source: /note="Description of Artificial Sequence: Synthetic peptide"
  MOD_RES (11)..(11): Citrulline
  MOD_RES (13)..(13): Citrulline
KGAAGGSWQQXGXGCL

SEQ ID NO: 4956 - protein, 16 aa, Artificial Sequence
  source: /note="Description of Artificial Sequence: Synthetic peptide"
  MOD_RES (7)..(7): Citrulline
  MOD_RES (9)..(9): Citrulline
GGSWQQXGXGCLPASS

SEQ ID NO: 4957 - protein, 16 aa, Artificial Sequence
  source: /note="Description of Artificial Sequence: Synthetic peptide"
  MOD_RES (1)..(1): Citrulline
  MOD_RES (12)..(12): Citrulline
XALGEGAELGAXGQSL

SEQ ID NO: 4958 - protein, 16 aa, Artificial Sequence
  source: /note="Description of Artificial Sequence: Synthetic peptide"
  MOD_RES (8)..(8): Citrulline
EGAELGAXGQSLPMGL

SEQ ID NO: 4959 - protein, 13 aa, Artificial Sequence
  source: /note="Description of Artificial Sequence: Synthetic peptide"
  MOD_RES (4)..(4): Citrulline
LGAXGQSLPMGLL

SEQ ID NO: 4960 - protein, 16 aa, Artificial Sequence
  source: /note="Description of Artificial Sequence: Synthetic peptide"
  MOD_RES (10)..(10): Citrulline
LHSNYQEISXGASIPG

SEQ ID NO: 4961 - protein, 16 aa, Artificial Sequence
  source: /note="Description of Artificial Sequence: Synthetic peptide"
  MOD_RES (6)..(6): Citrulline
YQEISXGASIPGTPPT

SEQ ID NO: 4962 - protein, 16 aa, Artificial Sequence
  source: /note="Description of Artificial Sequence: Synthetic peptide"
  MOD_RES (7)..(7): Citrulline
  MOD_RES (9)..(9): Citrulline
LCWVPWXEXGLPSGSK

SEQ ID NO: 4963 - protein, 16 aa, Artificial Sequence
  source: /note="Description of Artificial Sequence: Synthetic peptide"
  MOD_RES (3)..(3): Citrulline
  MOD_RES (5)..(5): Citrulline
PWXEXGLPSGSKDNNQ

SEQ ID NO: 4964 - protein, 15 aa, Artificial Sequence
  source: /note="Description of Artificial Sequence: Synthetic peptide"
  MOD_RES (9)..(9): Citrulline
AAEEACILXGGALST

SEQ ID NO: 4965 - protein, 16 aa, Artificial Sequence
  source: /note="Description of Artificial Sequence: Synthetic peptide"
  MOD_RES (5)..(5): Citrulline
  MOD_RES (13)..(13): Citrulline
ACILXGGALSTVXAGA

SEQ ID NO: 4966 - protein, 16 aa, Artificial Sequence
  source: /note="Description of Artificial Sequence: Synthetic peptide"
  MOD_RES (12)..(12): Citrulline
LSYSDNQASAKXGSLE

SEQ ID NO: 4967 - protein, 16 aa, Artificial Sequence
  source: /note="Description of Artificial Sequence: Synthetic peptide"
  MOD_RES (8)..(8): Citrulline
DNQASAKXGSLETKDD

SEQ ID NO: 4968 - protein, 16 aa, Artificial Sequence
  source: /note="Description of Artificial Sequence: Synthetic peptide"
  MOD_RES (8)..(8): Citrulline
KVLGNPGXGSIKTVAG

SEQ ID NO: 4969 - protein, 16 aa, Artificial Sequence
  source: /note="Description of Artificial Sequence: Synthetic peptide"
  MOD_RES (4)..(4): Citrulline
NPGXGSIKTVAGSGIA

SEQ ID NO: 4970 - protein, 16 aa, Artificial Sequence
  source: /note="Description of Artificial Sequence: Synthetic peptide"
  MOD_RES (9)..(9): Citrulline
SYEENFQEXGSETKQG

SEQ ID NO: 4971 - protein, 16 aa, Artificial Sequence
  source: /note="Description of Artificial Sequence: Synthetic peptide"
  MOD_RES (2)..(2): Citrulline
  MOD_RES (12)..(12): Citrulline
KXQYVFPVSQKXGTIE

SEQ ID NO: 4972 - protein, 16 aa, Artificial Sequence
  source: /note="Description of Artificial Sequence: Synthetic peptide"
  MOD_RES (8)..(8): Citrulline
  MOD_RES (15)..(15): Citrulline
VFPVSQKXGTIENEXG

SEQ ID NO: 4973 - protein, 16 aa, Artificial Sequence
  source: /note="Description of Artificial Sequence: Synthetic peptide"
  MOD_RES (4)..(4): Citrulline
  MOD_RES (11)..(11): Citrulline
SQKXGTIENEXGKPLP

SEQ ID NO: 4974 - protein, 16 aa, Artificial Sequence
  source: /note="Description of Artificial Sequence: Synthetic peptide"
  MOD_RES (9)..(9): Citrulline
  MOD_RES (11)..(11): Citrulline
LHDSYFGGXLXGQIAT

SEQ ID NO: 4975 - protein, 16 aa, Artificial Sequence
  source: /note="Description of Artificial Sequence: Synthetic peptide"
  MOD_RES (5)..(5): Citrulline
  MOD_RES (7)..(7): Citrulline
YFGGXLXGQIATEELH

SEQ ID NO: 4976 - protein, 16 aa, Artificial Sequence
  source: /note="Description of Artificial Sequence: Synthetic peptide"
  MOD_RES (7)..(7): Citrulline
LLILLSXGEDLQSSDP

SEQ ID NO: 4977 - protein, 16 aa, Artificial Sequence
  source: /note="Description of Artificial Sequence: Synthetic peptide"
  MOD_RES (3)..(3): Citrulline
LSXGEDLQSSDPATES

SEQ ID NO: 4978 - protein, 16 aa, Artificial Sequence
  source: /note="Description of Artificial Sequence: Synthetic peptide"
  MOD_RES (10)..(10): Citrulline
  MOD_RES (15)..(15): Citrulline
TESLESILSXGNKAXG

SEQ ID NO: 4979 - protein, 16 aa, Artificial Sequence
  source: /note="Description of Artificial Sequence: Synthetic peptide"
  MOD_RES (6)..(6): Citrulline
  MOD_RES (11)..(11): Citrulline
ESILSXGNKAXGLQEH

SEQ ID NO: 4980 - protein, 16 aa, Artificial Sequence
  source: /note="Description of Artificial Sequence: Synthetic peptide"
  MOD_RES (2)..(2): Citrulline
  MOD_RES (7)..(7): Citrulline
SXGNKAXGLQEHSISV

SEQ ID NO: 4981 - protein, 16 aa, Artificial Sequence
  source: /note="Description of Artificial Sequence: Synthetic peptide"
  MOD_RES (9)..(9): Citrulline
  MOD_RES (12)..(12): Citrulline
DLGASWDVXGSXGSGW

SEQ ID NO: 4982 - protein, 16 aa, Artificial Sequence
  source: /note="Description of Artificial Sequence: Synthetic peptide"
  MOD_RES (5)..(5): Citrulline
  MOD_RES (8)..(8): Citrulline
SWDVXGSXGSGWSGPF

SEQ ID NO: 4983 - protein, 16 aa, Artificial Sequence
  source: /note="Description of Artificial Sequence: Synthetic peptide"
  MOD_RES (1)..(1): Citrulline
  MOD_RES (4)..(4): Citrulline
XGSXGSGWSGPFGHQG

SEQ ID NO: 4984 - protein, 16 aa, Artificial Sequence
  source: /note="Description of Artificial Sequence: Synthetic peptide"
  MOD_RES (11)..(11): Citrulline
YNLTNPSDSGXGSSLL

SEQ ID NO: 4985 - protein, 16 aa, Artificial Sequence
  source: /note="Description of Artificial Sequence: Synthetic peptide"
  MOD_RES (7)..(7): Citrulline
  MOD_RES (14)..(14): Citrulline
NPSDSGXGSSLLDXTI

SEQ ID NO: 4986 - protein, 16 aa, Artificial Sequence
  source: /note="Description of Artificial Sequence: Synthetic peptide"
  MOD_RES (10)..(10): Citrulline
PCFLDAYVGXGNSYME

SEQ ID NO: 4987 - protein, 16 aa, Artificial Sequence
  source: /note="Description of Artificial Sequence: Synthetic peptide"
  MOD_RES (6)..(6): Citrulline
DAYVGXGNSYMEYGHD

SEQ ID NO: 4988 - protein, 16 aa, Artificial Sequence
  source: /note="Description of Artificial Sequence: Synthetic peptide"
  MOD_RES (2)..(2): Citrulline
  MOD_RES (6)..(6): Citrulline
FXAKVXGKIGLIEEAM

SEQ ID NO: 4989 - protein, 16 aa, Artificial Sequence
  source: /note="Description of Artificial Sequence: Synthetic peptide"
  MOD_RES (2)..(2): Citrulline
VXGKIGLIEEAMADYN

SEQ ID NO: 4990 - protein, 16 aa, Artificial Sequence
  source: /note="Description of Artificial Sequence: Synthetic peptide"
  MOD_RES (10)..(10): Citrulline
NAVIGYLSTXGSSVDG

SEQ ID NO: 4991 - protein, 16 aa, Artificial Sequence
  source: /note="Description of Artificial Sequence: Synthetic peptide"
  MOD_RES (6)..(6): Citrulline
GYLSTXGSSVDGSPLL

SEQ ID NO: 4992 - protein, 16 aa, Artificial Sequence
  source: /note="Description of Artificial Sequence: Synthetic peptide"
  MOD_RES (10)..(10): Citrulline
ASGALSKLTXGLKDES

SEQ ID NO: 4993 - protein, 16 aa, Artificial Sequence
  source: /note="Description of Artificial Sequence: Synthetic peptide"
  MOD_RES (6)..(6): Citrulline
LSKLTXGLKDESLAYI

SEQ ID NO: 4994 - protein, 16 aa, Artificial Sequence
  source: /note="Description of Artificial Sequence: Synthetic peptide"
  MOD_RES (12)..(12): Citrulline
PYETSQGKGTPXGHKI

SEQ ID NO: 4995 - protein, 16 aa, Artificial Sequence
  source: /note="Description of Artificial Sequence: Synthetic peptide"
  MOD_RES (8)..(8): Citrulline
SQGKGTPXGHKISDYF

SEQ ID NO: 4996 - protein, 16 aa, Artificial Sequence
  source: /note="Description of Artificial Sequence: Synthetic peptide"
  MOD_RES (4)..(4): Citrulline
GTPXGHKISDYFEFAG

SEQ ID NO: 4997 - protein, 16 aa, Artificial Sequence
  source: /note="Description of Artificial Sequence: Synthetic peptide"
  MOD_RES (12)..(12): Citrulline
QSWWQALDGKLXGDLI

SEQ ID NO: 4998 - protein, 16 aa, Artificial Sequence
  source: /note="Description of Artificial Sequence: Synthetic peptide"
  MOD_RES (8)..(8): Citrulline
  MOD_RES (14)..(14): Citrulline
QALDGKLXGDLISXGL

SEQ ID NO: 4999 - protein, 16 aa, Artificial Sequence
  source: /note="Description of Artificial Sequence: Synthetic peptide"
  MOD_RES (4)..(4): Citrulline
  MOD_RES (10)..(10): Citrulline
GKLXGDLISXGLEKML

SEQ ID NO: 5000 - protein, 16 aa, Artificial Sequence
  source: /note="Description of Artificial Sequence: Synthetic peptide"
  MOD_RES (6)..(6): Citrulline
  MOD_RES (15)..(15): Citrulline
GDLISXGLEKMLWAXK

SEQ ID NO: 5001 - protein, 16 aa, Artificial Sequence
  source: /note="Description of Artificial Sequence: Synthetic peptide"
  MOD_RES (14)..(14): Citrulline
DMEKGAKGFGFSIXGG

SEQ ID NO: 5002 - protein, 16 aa, Artificial Sequence
  source: /note="Description of Artificial Sequence: Synthetic peptide"
  MOD_RES (10)..(10): Citrulline
  MOD_RES (13)..(13): Citrulline
GAKGFGFSIXGGXEYK

SEQ ID NO: 5003 - protein, 16 aa, Artificial Sequence
  source: /note="Description of Artificial Sequence: Synthetic peptide"
  MOD_RES (6)..(6): Citrulline
  MOD_RES (9)..(9): Citrulline
FGFSIXGGXEYKMDLY

SEQ ID NO: 5004 - protein, 16 aa, Artificial Sequence
  source: /note="Description of Artificial Sequence: Synthetic peptide"
  MOD_RES (8)..(8): Citrulline
  MOD_RES (10)..(10): Citrulline
SLWEWLQXFXGSSSAV

SEQ ID NO: 5005 - protein, 16 aa, Artificial Sequence
  source: /note="Description of Artificial Sequence: Synthetic peptide"
  MOD_RES (4)..(4): Citrulline
  MOD_RES (6)..(6): Citrulline
WLQXFXGSSSAVPCVS

SEQ ID NO: 5006 - protein, 16 aa, Artificial Sequence
  source: /note="Description of Artificial Sequence: Synthetic peptide"
  MOD_RES (11)..(12): Citrulline
TNTLIDPAYLXXGPFK

SEQ ID NO: 5007 - protein, 16 aa, Artificial Sequence
  source: /note="Description of Artificial Sequence: Synthetic peptide"
  MOD_RES (7)..(8): Citrulline
IDPAYLXXGPFKDVAS

SEQ ID NO: 5008 - protein, 16 aa, Artificial Sequence
  source: /note="Description of Artificial Sequence: Synthetic peptide"
  MOD_RES (11)..(11): Citrulline
DSVQVYGYEGXGSSCG

SEQ ID NO: 5009 - protein, 16 aa, Artificial Sequence
  source: /note="Description of Artificial Sequence: Synthetic peptide"
  MOD_RES (7)..(7): Citrulline
VYGYEGXGSSCGSLSS

SEQ ID NO: 5010 - protein, 16 aa, Artificial Sequence
  source: /note="Description of Artificial Sequence: Synthetic peptide"
  MOD_RES (9)..(9): Citrulline
  MOD_RES (12)..(12): Citrulline
CKTGQPHPXLAXGESY

SEQ ID NO: 5011 - protein, 16 aa, Artificial Sequence
  source: /note="Description of Artificial Sequence: Synthetic peptide"
  MOD_RES (5)..(5): Citrulline
  MOD_RES (8)..(8): Citrulline
QPHPXLAXGESYTCGY

SEQ ID NO: 5012 - protein, 16 aa, Artificial Sequence
  source: /note="Description of Artificial Sequence: Synthetic peptide"
  MOD_RES (10)..(10): Citrulline
AWQDAAACPXGLQLQC

SEQ ID NO: 5013 - protein, 16 aa, Artificial Sequence
  source: /note="Description of Artificial Sequence: Synthetic peptide"
  MOD_RES (6)..(6): Citrulline
  MOD_RES (13)..(13): Citrulline
AAACPXGLQLQCXGAG

SEQ ID NO: 5014 - protein, 16 aa, Artificial Sequence
  source: /note="Description of Artificial Sequence: Synthetic peptide"
  MOD_RES (5)..(5): Citrulline
  MOD_RES (12)..(12): Citrulline
GGHEXPPSPGLXGLLT

SEQ ID NO: 5015 - protein, 16 aa, Artificial Sequence
  source: /note="Description of Artificial Sequence: Synthetic peptide"
  MOD_RES (1)..(1): Citrulline
  MOD_RES (8)..(8): Citrulline
XPPSPGLXGLLTDSPA

SEQ ID NO: 5016 - protein, 16 aa, Artificial Sequence
  source: /note="Description of Artificial Sequence: Synthetic peptide"
  MOD_RES (10)..(10): Citrulline
LNLKEIISQXGTLENS

SEQ ID NO: 5017 - protein, 16 aa, Artificial Sequence
  source: /note="Description of Artificial Sequence: Synthetic peptide"
  MOD_RES (6)..(6): Citrulline
EIISQXGTLENSNSPV

SEQ ID NO: 5018 - protein, 16 aa, Artificial Sequence
  source: /note="Description of Artificial Sequence: Synthetic peptide"
  MOD_RES (7)..(7): Citrulline
  MOD_RES (12)..(12): Citrulline
PFSGAAXACAAXGAAV

SEQ ID NO: 5019 - protein, 16 aa, Artificial Sequence
  source: /note="Description of Artificial Sequence: Synthetic peptide"
  MOD_RES (3)..(3): Citrulline
  MOD_RES (8)..(8): Citrulline
AAXACAAXGAAVAKVG

SEQ ID NO: 5020 - protein, 16 aa, Artificial Sequence
  source: /note="Description of Artificial Sequence: Synthetic peptide"
  MOD_RES (4)..(4): Citrulline
CAAXGAAVAKVGQLFA

SEQ ID NO: 5021 - protein, 16 aa, Artificial Sequence
  source: /note="Description of Artificial Sequence: Synthetic peptide"
  MOD_RES (15)..(15): Citrulline
QGPEHPNPGKPFTAXG

SEQ ID NO: 5022 - protein, 16 aa, Artificial Sequence
  source: /note="Description of Artificial Sequence: Synthetic peptide"
  MOD_RES (11)..(11): Citrulline
  MOD_RES (15)..(15): Citrulline
HPNPGKPFTAXGFPXQ

SEQ ID NO: 5023 - protein, 16 aa, Artificial Sequence
  source: /note="Description of Artificial Sequence: Synthetic peptide"
  MOD_RES (7)..(7): Citrulline
  MOD_RES (11)..(11): Citrulline
GKPFTAXGFPXQCYLP

SEQ ID NO: 5024 - protein, 16 aa, Artificial Sequence
  source: /note="Description of Artificial Sequence: Synthetic peptide"
  MOD_RES (8)..(8): Citrulline
YFPILAGXGSTSLPVG

SEQ ID NO: 5025 - protein, 16 aa, Artificial Sequence
  source: /note="Description of Artificial Sequence: Synthetic peptide"
  MOD_RES (4)..(4): Citrulline
LAGXGSTSLPVGTPSL

SEQ ID NO: 5026 - protein, 16 aa, Artificial Sequence
  source: /note="Description of Artificial Sequence: Synthetic peptide"
  MOD_RES (10)..(10): Citrulline
TSSETVFGKXGHVLGN

SEQ ID NO: 5027 - protein, 16 aa, Artificial Sequence
  source: /note="Description of Artificial Sequence: Synthetic peptide"
  MOD_RES (6)..(6): Citrulline
TVFGKXGHVLGNGSQV

SEQ ID NO: 5028 - protein, 16 aa, Artificial Sequence
  source: /note="Description of Artificial Sequence: Synthetic peptide"
  MOD_RES (2)..(2): Citrulline
KXGHVLGNGSQVTQAA

SEQ ID NO: 5029 - protein, 16 aa, Artificial Sequence
  source: /note="Description of Artificial Sequence: Synthetic peptide"
  MOD_RES (5)..(5): Citrulline
  MOD_RES (9)..(9): Citrulline
KAKTXGAPXTSLFEND

SEQ ID NO: 5030 - protein, 16 aa, Artificial Sequence
  source: /note="Description of Artificial Sequence: Synthetic peptide"
  MOD_RES (1)..(1): Citrulline
  MOD_RES (5)..(5): Citrulline
XGAPXTSLFENDKDAG

SEQ ID NO: 5031 - protein, 16 aa, Artificial Sequence
  source: /note="Description of Artificial Sequence: Synthetic peptide"
  MOD_RES (14)..(14): Citrulline
CCWWPQGSQGKTLXGS

SEQ ID NO: 5032 - protein, 16 aa, Artificial Sequence
  source: /note="Description of Artificial Sequence: Synthetic peptide"
  MOD_RES (10)..(10): Citrulline
PQGSQGKTLXGSFSST

SEQ ID NO: 5033 - protein, 16 aa, Artificial Sequence
  source: /note="Description of Artificial Sequence: Synthetic peptide"
  MOD_RES (6)..(6): Citrulline
QGKTLXGSFSSTAAQD

SEQ ID NO: 5034 - protein, 16 aa, Artificial Sequence
  source: /note="Description of Artificial Sequence: Synthetic peptide"
  MOD_RES (4)..(4): Citrulline
  MOD_RES (10)..(10): Citrulline
TIVXEEGAVXGLYKGL

SEQ ID NO: 5035 - protein, 16 aa, Artificial Sequence
  source: /note="Description of Artificial Sequence: Synthetic peptide"
  MOD_RES (6)..(6): Citrulline
EEGAVXGLYKGLSMNW

SEQ ID NO: 5036 - protein, 16 aa, Artificial Sequence
  source: /note="Description of Artificial Sequence: Synthetic peptide"
  MOD_RES (12)..(12): Citrulline
QPNKSPPGMWQXGMWQ

SEQ ID NO: 5037 - protein, 16 aa, Artificial Sequence
  source: /note="Description of Artificial Sequence: Synthetic peptide"
  MOD_RES (8)..(8): Citrulline
SPPGMWQXGMWQPGMS

SEQ ID NO: 5038 - protein, 16 aa, Artificial Sequence
  source: /note="Description of Artificial Sequence: Synthetic peptide"
  MOD_RES (4)..(4): Citrulline
MWQXGMWQPGMSQQVP

SEQ ID NO: 5039 - protein, 16 aa, Artificial Sequence
  source: /note="Description of Artificial Sequence: Synthetic peptide"
  MOD_RES (9)..(9): Citrulline
YTEDYEQPXGKGSFPA

SEQ ID NO: 5040 - protein, 16 aa, Artificial Sequence
  source: /note="Description of Artificial Sequence: Synthetic peptide"
  MOD_RES (5)..(5): Citrulline
YEQPXGKGSFPAMITP

SEQ ID NO: 5041 - protein, 16 aa, Artificial Sequence
  source: /note="Description of Artificial Sequence: Synthetic peptide"
  MOD_RES (8)..(8): Citrulline
  MOD_RES (10)..(10): Citrulline
KYKEDYEXSXGKLIGA

SEQ ID NO: 5042 - protein, 16 aa, Artificial Sequence
  source: /note="Description of Artificial Sequence: Synthetic peptide"
  MOD_RES (4)..(4): Citrulline
  MOD_RES (6)..(6): Citrulline
DYEXSXGKLIGAKDVQ

SEQ ID NO: 5043 - protein, 16 aa, Artificial Sequence
  source: /note="Description of Artificial Sequence: Synthetic peptide"
  MOD_RES (2)..(2): Citrulline
SXGKLIGAKDVQGDSQ

SEQ ID NO: 5044 - protein, 16 aa, Artificial Sequence
  source: /note="Description of Artificial Sequence: Synthetic peptide"
  MOD_RES (5)..(5): Citrulline
  MOD_RES (12)..(12): Citrulline
DFLYXHDFVKEXGKLI

SEQ ID NO: 5045 - protein, 16 aa, Artificial Sequence
  source: /note="Description of Artificial Sequence: Synthetic peptide"
  MOD_RES (1)..(1): Citrulline
  MOD_RES (8)..(8): Citrulline
XHDFVKEXGKLIGPQS

SEQ ID NO: 5046 - protein, 16 aa, Artificial Sequence
  source: /note="Description of Artificial Sequence: Synthetic peptide"
  MOD_RES (11)..(11): Citrulline
VKYKSDLNLTXGVGWT

SEQ ID NO: 5047 - protein, 16 aa, Artificial Sequence
  source: /note="Description of Artificial Sequence: Synthetic peptide"
  MOD_RES (7)..(7): Citrulline
SDLNLTXGVGWTPPGS

SEQ ID NO: 5048 - protein, 16 aa, Artificial Sequence
  source: /note="Description of Artificial Sequence: Synthetic peptide"
  MOD_RES (3)..(3): Citrulline
LTXGVGWTPPGSYKVE

SEQ ID NO: 5049 - protein, 16 aa, Artificial Sequence
  source: /note="Description of Artificial Sequence: Synthetic peptide"
  MOD_RES (8)..(8): Citrulline
ASFHNLSXGEANVLEK

SEQ ID NO: 5050 - protein, 16 aa, Artificial Sequence
  source: /note="Description of Artificial Sequence: Synthetic peptide"
  MOD_RES (4)..(4): Citrulline
  MOD_RES (10)..(10): Citrulline
EQEXAEQLAXGAALKW

SEQ ID NO: 5051 - protein, 16 aa, Artificial Sequence
  source: /note="Description of Artificial Sequence: Synthetic peptide"
  MOD_RES (6)..(6): Citrulline
AEQLAXGAALKWASGI

SEQ ID NO: 5052 - protein, 16 aa, Artificial Sequence
  source: /note="Description of Artificial Sequence: Synthetic peptide"
  MOD_RES (1)..(1): Citrulline
  MOD_RES (8)..(8): Citrulline
XEALSQAXGLLQGMSQ

SEQ ID NO: 5053 - protein, 16 aa, Artificial Sequence
  source: /note="Description of Artificial Sequence: Synthetic peptide"
  MOD_RES (4)..(4): Citrulline
SQAXGLLQGMSQALQT

SEQ ID NO: 5054 - protein, 16 aa, Artificial Sequence
  source: /note="Description of Artificial Sequence: Synthetic peptide"
  MOD_RES (8)..(8): Citrulline
CVYGGVLXGTGKQAFG

SEQ ID NO: 5055 - protein, 16 aa, Artificial Sequence
  source: /note="Description of Artificial Sequence: Synthetic peptide"
  MOD_RES (4)..(4): Citrulline
GVLXGTGKQAFGAAVN

SEQ ID NO: 5056 - protein, 16 aa, Artificial Sequence
  source: /note="Description of Artificial Sequence: Synthetic peptide"
  MOD_RES (9)..(10): Citrulline
LSVKQLVIXXGAALGA

SEQ ID NO: 5057 - protein, 16 aa, Artificial Sequence
  source: /note="Description of Artificial Sequence: Synthetic peptide"
  MOD_RES (5)..(6): Citrulline
QLVIXXGAALGAASAT

SEQ ID NO: 5058 - protein, 16 aa, Artificial Sequence
  source: /note="Description of Artificial Sequence: Synthetic peptide"
  MOD_RES (6)..(6): Citrulline
  MOD_RES (9)..(9): Citrulline
LVIQQXGVXIYDGEEK

SEQ ID NO: 5059 - protein, 16 aa, Artificial Sequence
  source: /note="Description of Artificial Sequence: Synthetic peptide"
  MOD_RES (2)..(2): Citrulline
  MOD_RES (5)..(5): Citrulline
QXGVXIYDGEEKIKFD

SEQ ID NO: 5060 - protein, 16 aa, Artificial Sequence
  source: /note="Description of Artificial Sequence: Synthetic peptide"
  MOD_RES (7)..(7): Citrulline
  MOD_RES (9)..(9): Citrulline
VYCLVNXAXGMELLSP

SEQ ID NO: 5061 - protein, 16 aa, Artificial Sequence
  source: /note="Description of Artificial Sequence: Synthetic peptide"
  MOD_RES (3)..(3): Citrulline
  MOD_RES (5)..(5): Citrulline
VNXAXGMELLSPEDLV

SEQ ID NO: 5062 - protein, 16 aa, Artificial Sequence
  source: /note="Description of Artificial Sequence: Synthetic peptide"
  MOD_RES (1)..(1): Citrulline
  MOD_RES (10)..(10): Citrulline
XATVPYQLLXGSQHSP

SEQ ID NO: 5063 - protein, 16 aa, Artificial Sequence
  source: /note="Description of Artificial Sequence: Synthetic peptide"
  MOD_RES (6)..(6): Citrulline
  MOD_RES (14)..(14): Citrulline
PYQLLXGSQHSPTXPP

SEQ ID NO: 5064 - protein, 16 aa, Artificial Sequence
  source: /note="Description of Artificial Sequence: Synthetic peptide"
  MOD_RES (8)..(8): Citrulline
NGTFNLSXGQTPLTEG

SEQ ID NO: 5065 - protein, 16 aa, Artificial Sequence
  source: /note="Description of Artificial Sequence: Synthetic peptide"
  MOD_RES (7)..(8): Citrulline
TSLVVWXXGSKVLAAG

SEQ ID NO: 5066 - protein, 16 aa, Artificial Sequence
  source: /note="Description of Artificial Sequence: Synthetic peptide"
  MOD_RES (3)..(4): Citrulline
VWXXGSKVLAAGGLGP

SEQ ID NO: 5067 - protein, 16 aa, Artificial Sequence
  source: /note="Description of Artificial Sequence: Synthetic peptide"
  MOD_RES (5)..(5): Citrulline
  MOD_RES (8)..(8): Citrulline
PSLEXTLXGMANLTAF

SEQ ID NO: 5068 - protein, 16 aa, Artificial Sequence
  source: /note="Description of Artificial Sequence: Synthetic peptide"
  MOD_RES (1)..(1): Citrulline
  MOD_RES (4)..(4): Citrulline
XTLXGMANLTAFPGWS

SEQ ID NO: 5069 - protein, 16 aa, Artificial Sequence
  source: /note="Description of Artificial Sequence: Synthetic peptide"
  MOD_RES (4)..(4): Citrulline
  MOD_RES (10)..(10): Citrulline
NIQXLIASPXGSKSYL

SEQ ID NO: 5070 - protein, 16 aa, Artificial Sequence
  source: /note="Description of Artificial Sequence: Synthetic peptide"
  MOD_RES (7)..(7): Citrulline
  MOD_RES (10)..(10): Citrulline
GSPVAEXGKXLPGVAG

SEQ ID NO: 5071 - protein, 16 aa, Artificial Sequence
  source: /note="Description of Artificial Sequence: Synthetic peptide"
  MOD_RES (5)..(5): Citrulline
  MOD_RES (10)..(10): Citrulline
CVPGXAGQHXGSATSL

SEQ ID NO: 5072 - protein, 16 aa, Artificial Sequence
  source: /note="Description of Artificial Sequence: Synthetic peptide"
  MOD_RES (9)..(9): Citrulline
SFEGTLYKXGALLKGW

SEQ ID NO: 5073 - protein, 16 aa, Artificial Sequence
  source: /note="Description of Artificial Sequence: Synthetic peptide"
  MOD_RES (8)..(8): Citrulline
  MOD_RES (12)..(12): Citrulline
GSINGATXLTIXGEGF

SEQ ID NO: 5074 - protein, 16 aa, Artificial Sequence
  source: /note="Description of Artificial Sequence: Synthetic peptide"
  MOD_RES (4)..(4): Citrulline
  MOD_RES (8)..(8): Citrulline
GATXLTIXGEGFSQAN

SEQ ID NO: 5075 - protein, 16 aa, Artificial Sequence
  source: /note="Description of Artificial Sequence: Synthetic peptide"
  MOD_RES (4)..(4): Citrulline
LTIXGEGFSQANQFNY

SEQ ID NO: 5076 - protein, 16 aa, Artificial Sequence
  source: /note="Description of Artificial Sequence: Synthetic peptide"
  MOD_RES (11)..(11): Citrulline
VLEVTSMFPQXGSLFG

SEQ ID NO: 5077 - protein, 16 aa, Artificial Sequence
  source: /note="Description of Artificial Sequence: Synthetic peptide"
  MOD_RES (7)..(7): Citrulline
TSMFPQXGSLFGGTEI

SEQ ID NO: 5078 - protein, 16 aa, Artificial Sequence
  source: /note="Description of Artificial Sequence: Synthetic peptide"
  MOD_RES (7)..(7): Citrulline
  MOD_RES (13)..(13): Citrulline
EDTPFLXGIIPSXGPP

SEQ ID NO: 5079 - protein, 16 aa, Artificial Sequence
  source: /note="Description of Artificial Sequence: Synthetic peptide"
  MOD_RES (3)..(3): Citrulline
  MOD_RES (9)..(9): Citrulline
FLXGIIPSXGPPGTEI

SEQ ID NO: 5080 - protein, 16 aa, Artificial Sequence
  source: /note="Description of Artificial Sequence: Synthetic peptide"
  MOD_RES (2)..(2): Citrulline
  MOD_RES (7)..(7): Citrulline
TXNILIXGSDNVEWNN

SEQ ID NO: 5081 - protein, 16 aa, Artificial Sequence
  source: /note="Description of Artificial Sequence: Synthetic peptide"
  MOD_RES (3)..(3): Citrulline
LIXGSDNVEWNNKIPA

SEQ ID NO: 5082 - protein, 16 aa, Artificial Sequence
  source: /note="Description of Artificial Sequence: Synthetic peptide"
  MOD_RES (9)..(9): Citrulline
  MOD_RES (15)..(15): Citrulline
FESQHILLXGDKTSXD

SEQ ID NO: 5083 - protein, 16 aa, Artificial Sequence
  source: /note="Description of Artificial Sequence: Synthetic peptide"
  MOD_RES (5)..(5): Citrulline
  MOD_RES (11)..(11): Citrulline
HILLXGDKTSXDMWAT

SEQ ID NO: 5084 - protein, 16 aa, Artificial Sequence
  source: /note="Description of Artificial Sequence: Synthetic peptide"
  MOD_RES (9)..(10): Citrulline
QFQGGFSSXXGCLEGS

SEQ ID NO: 5085 - protein, 16 aa, Artificial Sequence
  source: /note="Description of Artificial Sequence: Synthetic peptide"
  MOD_RES (5)..(6): Citrulline
GFSSXXGCLEGSQGTQ

SEQ ID NO: 5086 - protein, 16 aa, Artificial Sequence
  source: /note="Description of Artificial Sequence: Synthetic peptide"
  MOD_RES (11)..(11): Citrulline
TYLSESQIQSXGKQID

SEQ ID NO: 5087 - protein, 16 aa, Artificial Sequence
  source: /note="Description of Artificial Sequence: Synthetic peptide"
  MOD_RES (7)..(7): Citrulline
ESQIQSXGKQIDVKNN

SEQ ID NO: 5088 - protein, 16 aa, Artificial Sequence
  source: /note="Description of Artificial Sequence: Synthetic peptide"
  MOD_RES (3)..(3): Citrulline
QSXGKQIDVKNNLQIH

SEQ ID NO: 5089 - protein, 16 aa, Artificial Sequence
  source: /note="Description of Artificial Sequence: Synthetic peptide"
  MOD_RES (8)..(8): Citrulline
SQFIYHQXGHTGEKPY

SEQ ID NO: 5090 - protein, 16 aa, Artificial Sequence
  source: /note="Description of Artificial Sequence: Synthetic peptide"
  MOD_RES (4)..(4): Citrulline
YHQXGHTGEKPYKCEE

SEQ ID NO: 5091 - protein, 16 aa, Artificial Sequence
  source: /note="Description of Artificial Sequence: Synthetic peptide"
  MOD_RES (6)..(6): Citrulline
  MOD_RES (10)..(10): Citrulline
QAGGAXGDAXGAQLWP

SEQ ID NO: 5092 - protein, 16 aa, Artificial Sequence
  source: /note="Description of Artificial Sequence: Synthetic peptide"
  MOD_RES (2)..(2): Citrulline
  MOD_RES (6)..(6): Citrulline
AXGDAXGAQLWPPGSD

SEQ ID NO: 5093 - protein, 16 aa, Artificial Sequence
  source: /note="Description of Artificial Sequence: Synthetic peptide"
  MOD_RES (11)..(11): Citrulline
  MOD_RES (13)..(13): Citrulline
MEMINANAKTXGXIID

SEQ ID NO: 5094 - protein, 16 aa, Artificial Sequence
  source: /note="Description of Artificial Sequence: Synthetic peptide"
  MOD_RES (7)..(7): Citrulline
  MOD_RES (9)..(9): Citrulline
NANAKTXGXIIDFKEI

SEQ ID NO: 5095 - protein, 16 aa, Artificial Sequence
  source: /note="Description of Artificial Sequence: Synthetic peptide"
  MOD_RES (3)..(3): Citrulline
  MOD_RES (5)..(5): Citrulline
KTXGXIIDFKEIQYGY

SEQ ID NO: 5096 - protein, 16 aa, Artificial Sequence
  source: /note="Description of Artificial Sequence: Synthetic peptide"
  MOD_RES (10)..(10): Citrulline
  MOD_RES (14)..(14): Citrulline
LEYGQDLSVXGKNXKE

SEQ ID NO: 5097 - protein, 16 aa, Artificial Sequence
  source: /note="Description of Artificial Sequence: Synthetic peptide"
  MOD_RES (6)..(6): Citrulline
  MOD_RES (10)..(10): Citrulline
QDLSVXGKNXKELLGG

SEQ ID NO: 5098 - protein, 16 aa, Artificial Sequence
  source: /note="Description of Artificial Sequence: Synthetic peptide"
  MOD_RES (8)..(8): Citrulline
  MOD_RES (10)..(10): Citrulline
TEPEDPPXGXGMLPIP

SEQ ID NO: 5099 - protein, 16 aa, Artificial Sequence
  source: /note="Description of Artificial Sequence: Synthetic peptide"
  MOD_RES (4)..(4): Citrulline
  MOD_RES (6)..(6): Citrulline
DPPXGXGMLPIPVAAA

SEQ ID NO: 5100 - protein, 16 aa, Artificial Sequence
  source: /note="Description of Artificial Sequence: Synthetic peptide"
  MOD_RES (4)..(4): Citrulline
  MOD_RES (14)..(14): Citrulline
SIWXGAQMEKEWAXAL

SEQ ID NO: 5101 - protein, 16 aa, Artificial Sequence
  source: /note="Description of Artificial Sequence: Synthetic peptide"
  MOD_RES (2)..(2): Citrulline
  MOD_RES (10)..(10): Citrulline
PXGLEGGVLXGSKLEK

SEQ ID NO: 5102 - protein, 16 aa, Artificial Sequence
  source: /note="Description of Artificial Sequence: Synthetic peptide"
  MOD_RES (6)..(6): Citrulline
  MOD_RES (16)..(16): Citrulline
EGGVLXGSKLEKGHLX

SEQ ID NO: 5103 - protein, 16 aa, Artificial Sequence
  source: /note="Description of Artificial Sequence: Synthetic peptide"
  MOD_RES (2)..(2): Citrulline
  MOD_RES (12)..(12): Citrulline
LXGSKLEKGHLXGPEI

SEQ ID NO: 5104 - protein, 16 aa, Artificial Sequence
  source: /note="Description of Artificial Sequence: Synthetic peptide"
  MOD_RES (6)..(6): Citrulline
  MOD_RES (16)..(16): Citrulline
EGYVWXGSQLEDQALX

SEQ ID NO: 5105 - protein, 16 aa, Artificial Sequence
  source: /note="Description of Artificial Sequence: Synthetic peptide"
  MOD_RES (2)..(2): Citrulline
  MOD_RES (12)..(12): Citrulline
WXGSQLEDQALXGLEG

SEQ ID NO: 5106 - protein, 16 aa, Artificial Sequence
  source: /note="Description of Artificial Sequence: Synthetic peptide"
  MOD_RES (6)..(6): Citrulline
  MOD_RES (14)..(14): Citrulline
STTDLXGTQFDYEXGK

SEQ ID NO: 5107 - protein, 16 aa, Artificial Sequence
  source: /note="Description of Artificial Sequence: Synthetic peptide"
  MOD_RES (2)..(2): Citrulline
  MOD_RES (10)..(10): Citrulline
LXGTQFDYEXGKGEST

SEQ ID NO: 5108 - protein, 16 aa, Artificial Sequence
  source: /note="Description of Artificial Sequence: Synthetic peptide"
  MOD_RES (12)..(12): Citrulline
QTGGIYVHEKGXGQFI

SEQ ID NO: 5109 - protein, 16 aa, Artificial Sequence
  source: /note="Description of Artificial Sequence: Synthetic peptide"
  MOD_RES (8)..(8): Citrulline
IYVHEKGXGQFIENKI

SEQ ID NO: 5110 - protein, 16 aa, Artificial Sequence
  source: /note="Description of Artificial Sequence: Synthetic peptide"
  MOD_RES (4)..(4): Citrulline
EKGXGQFIENKIYANN

SEQ ID NO: 5111 - protein, 16 aa, Artificial Sequence
  source: /note="Description of Artificial Sequence: Synthetic peptide"
  MOD_RES (7)..(7): Citrulline
NSDPTIXGNSIFNGNQ

SEQ ID NO: 5112 - protein, 16 aa, Artificial Sequence
  source: /note="Description of Artificial Sequence: Synthetic peptide"
  MOD_RES (3)..(3): Citrulline
TIXGNSIFNGNQGGVY

SEQ ID NO: 5113 - protein, 16 aa, Artificial Sequence
  source: /note="Description of Artificial Sequence: Synthetic peptide"
  MOD_RES (4)..(4): Citrulline
  MOD_RES (15)..(15): Citrulline
PLSXGTQAVVVGKGXG

SEQ ID NO: 5114 - protein, 16 aa, Artificial Sequence
  source: /note="Description of Artificial Sequence: Synthetic peptide"
  MOD_RES (1)..(1): Citrulline
  MOD_RES (11)..(11): Citrulline
XYSGNAGDAFXGLKKE

SEQ ID NO: 5115 - protein, 16 aa, Artificial Sequence
  source: /note="Description of Artificial Sequence: Synthetic peptide"
  MOD_RES (7)..(7): Citrulline
NAGDAFXGLKKEDNQN

SEQ ID NO: 5116 - protein, 16 aa, Artificial Sequence
  source: /note="Description of Artificial Sequence: Synthetic peptide"
  MOD_RES (3)..(3): Citrulline
AFXGLKKEDNQNAMPF

SEQ ID NO: 5117 - protein, 16 aa, Artificial Sequence
  source: /note="Description of Artificial Sequence: Synthetic peptide"
  MOD_RES (11)..(11): Citrulline
YGLDSPKAEVXGQVLA

SEQ ID NO: 5118 - protein, 16 aa, Artificial Sequence
  source: /note="Description of Artificial Sequence: Synthetic peptide"
  MOD_RES (7)..(7): Citrulline
SPKAEVXGQVLAPLPL

SEQ ID NO: 5119 - protein, 16 aa, Artificial Sequence
  source: /note="Description of Artificial Sequence: Synthetic peptide"
  MOD_RES (3)..(3): Citrulline
EVXGQVLAPLPLHGVA

SEQ ID NO: 5120 - protein, 16 aa, Artificial Sequence
  source: /note="Description of Artificial Sequence: Synthetic peptide"
  MOD_RES (10)..(10): Citrulline
DCPSGYYAEXGACKKC

SEQ ID NO: 5121 - protein, 16 aa, Artificial Sequence
  source: /note="Description of Artificial Sequence: Synthetic peptide"
  MOD_RES (14)..(14): Citrulline
LFYALESGSDFKSXGM

SEQ ID NO: 5122 - protein, 16 aa, Artificial Sequence
  source: /note="Description of Artificial Sequence: Synthetic peptide"
  MOD_RES (10)..(10): Citrulline
LESGSDFKSXGMSAAS

SEQ ID NO: 5123 - protein, 16 aa, Artificial Sequence
  source: /note="Description of Artificial Sequence: Synthetic peptide"
  MOD_RES (9)..(9): Citrulline
ENVLKEDAXGSVVLGQ

SEQ ID NO: 5124 - protein, 16 aa, Artificial Sequence
  source: /note="Description of Artificial Sequence: Synthetic peptide"
  MOD_RES (5)..(5): Citrulline
KEDAXGSVVLGQVDAQ

SEQ ID NO: 5125 - protein, 16 aa, Artificial Sequence
  source: /note="Description of Artificial Sequence: Synthetic peptide"
  MOD_RES (1)..(1): Citrulline
  MOD_RES (10)..(10): Citrulline
XGTDGAAGPXGAPGLK

SEQ ID NO: 5126 - protein, 16 aa, Artificial Sequence
  source: /note="Description of Artificial Sequence: Synthetic peptide"
  MOD_RES (6)..(6): Citrulline
GAAGPXGAPGLKGEQG

SEQ ID NO: 5127 - protein, 16 aa, Artificial Sequence
  source: /note="Description of Artificial Sequence: Synthetic peptide"
  MOD_RES (7)..(8): Citrulline
GPLGVEXXGSGKVINQ

SEQ ID NO: 5128 - protein, 16 aa, Artificial Sequence
  source: /note="Description of Artificial Sequence: Synthetic peptide"
  MOD_RES (9)..(9): Citrulline
EGCQGLGSXGNISLGP

SEQ ID NO: 5129 - protein, 16 aa, Artificial Sequence
  source: /note="Description of Artificial Sequence: Synthetic peptide"
  MOD_RES (5)..(5): Citrulline
GLGSXGNISLGPGETL

SEQ ID NO: 5130 - protein, 16 aa, Artificial Sequence
  source: /note="Description of Artificial Sequence: Synthetic peptide"
  MOD_RES (11)..(11): Citrulline
  MOD_RES (13)..(13): Citrulline
SGWAGGYGFGXGXASG

SEQ ID NO: 5131 - protein, 16 aa, Artificial Sequence
  source: /note="Description of Artificial Sequence: Synthetic peptide"
  MOD_RES (7)..(7): Citrulline
  MOD_RES (9)..(9): Citrulline
GGYGFGXGXASGFAGS

SEQ ID NO: 5132 - protein, 16 aa, Artificial Sequence
  source: /note="Description of Artificial Sequence: Synthetic peptide"
  MOD_RES (5)..(5): Citrulline
  MOD_RES (11)..(11): Citrulline
AEALXTSGLAXGAPLA

SEQ ID NO: 5133 - protein, 16 aa, Artificial Sequence
  source: /note="Description of Artificial Sequence: Synthetic peptide"
  MOD_RES (1)..(1): Citrulline
  MOD_RES (7)..(7): Citrulline
XTSGLAXGAPLAQELC

SEQ ID NO: 5134 - protein, 16 aa, Artificial Sequence
  source: /note="Description of Artificial Sequence: Synthetic peptide"
  MOD_RES (3)..(3): Citrulline
LAXGAPLAQELCSESK

SEQ ID NO: 5135 - protein, 16 aa, Artificial Sequence
  source: /note="Description of Artificial Sequence: Synthetic peptide"
  MOD_RES (7)..(8): Citrulline
SFLPCLXXGSLPDTQP

SEQ ID NO: 5136 - protein, 16 aa, Artificial Sequence
  source: /note="Description of Artificial Sequence: Synthetic peptide"
  MOD_RES (3)..(4): Citrulline
CLXXGSLPDTQPSQGP

SEQ ID NO: 5137 - protein, 16 aa, Artificial Sequence
  source: /note="Description of Artificial Sequence: Synthetic peptide"
  MOD_RES (7)..(7): Citrulline
  MOD_RES (9)..(9): Citrulline
GCGPHCXLXGEALVAL

SEQ ID NO: 5138 - protein, 16 aa, Artificial Sequence
  source: /note="Description of Artificial Sequence: Synthetic peptide"
  MOD_RES (3)..(3): Citrulline
  MOD_RES (5)..(5): Citrulline
HCXLXGEALVALGQPP

SEQ ID NO: 5139 - protein, 16 aa, Artificial Sequence
  source: /note="Description of Artificial Sequence: Synthetic peptide"
  MOD_RES (6)..(6): Citrulline
SGVMVXGHSSQLGCSQ

SEQ ID NO: 5140 - protein, 16 aa, Artificial Sequence
  source: /note="Description of Artificial Sequence: Synthetic peptide"
  MOD_RES (9)..(9): Citrulline
VMGLIETTXGLLPGAG

SEQ ID NO: 5141 - protein, 16 aa, Artificial Sequence
  source: /note="Description of Artificial Sequence: Synthetic peptide"
  MOD_RES (5)..(5): Citrulline
  MOD_RES (16)..(16): Citrulline
IETTXGLLPGAGGTQX

SEQ ID NO: 5142 - protein, 16 aa, Artificial Sequence
  source: /note="Description of Artificial Sequence: Synthetic peptide"
  MOD_RES (11)..(11): Citrulline
  MOD_RES (13)..(13): Citrulline
LDTISSVGSWXGXSSK

SEQ ID NO: 5143 - protein, 16 aa, Artificial Sequence
  source: /note="Description of Artificial Sequence: Synthetic peptide"
  MOD_RES (7)..(7): Citrulline
  MOD_RES (9)..(9): Citrulline
SSVGSWXGXSSKSPAH

SEQ ID NO: 5144 - protein, 16 aa, Artificial Sequence
  source: /note="Description of Artificial Sequence: Synthetic peptide"
  MOD_RES (1)..(1): Citrulline
  MOD_RES (12)..(12): Citrulline
XDSDAPGKEGYXGGLL

SEQ ID NO: 5145 - protein, 16 aa, Artificial Sequence
  source: /note="Description of Artificial Sequence: Synthetic peptide"
  MOD_RES (8)..(8): Citrulline
APGKEGYXGGLLKLEA

SEQ ID NO: 5146 - protein, 16 aa, Artificial Sequence
  source: /note="Description of Artificial Sequence: Synthetic peptide"
  MOD_RES (4)..(4): Citrulline
EGYXGGLLKLEAADPY

SEQ ID NO: 5147 - protein, 16 aa, Artificial Sequence
  source: /note="Description of Artificial Sequence: Synthetic peptide"
  MOD_RES (11)..(11): Citrulline
NGCDEPVPSVXGSPSS

SEQ ID NO: 5148 - protein, 16 aa, Artificial Sequence
  source: /note="Description of Artificial Sequence: Synthetic peptide"
  MOD_RES (7)..(7): Citrulline
EPVPSVXGSPSSETPS

SEQ ID NO: 5149 - protein, 16 aa, Artificial Sequence
  source: /note="Description of Artificial Sequence: Synthetic peptide"
  MOD_RES (3)..(3): Citrulline
SVXGSPSSETPSPGSD

SEQ ID NO: 5150 - protein, 16 aa, Artificial Sequence
  source: /note="Description of Artificial Sequence: Synthetic peptide"
  MOD_RES (11)..(11): Citrulline
STVTTPPPLVXGTQNI

SEQ ID NO: 5151 - protein, 16 aa, Artificial Sequence
  source: /note="Description of Artificial Sequence: Synthetic peptide"
  MOD_RES (7)..(7): Citrulline
TPPPLVXGTQNIPAGK

SEQ ID NO: 5152 - protein, 16 aa, Artificial Sequence
  source: /note="Description of Artificial Sequence: Synthetic peptide"
  MOD_RES (3)..(3): Citrulline
LVXGTQNIPAGKPSLQ

SEQ ID NO: 5153 - protein, 16 aa, Artificial Sequence
  source: /note="Description of Artificial Sequence: Synthetic peptide"
  MOD_RES (9)..(9): Citrulline
SVIPPPLVXGGQQASS

SEQ ID NO: 5154 - protein, 16 aa, Artificial Sequence
  source: /note="Description of Artificial Sequence: Synthetic peptide"
  MOD_RES (5)..(5): Citrulline
PPLVXGGQQASSKLGP

SEQ ID NO: 5155 - protein, 16 aa, Artificial Sequence
  source: /note="Description of Artificial Sequence: Synthetic peptide"
  MOD_RES (13)..(13): Citrulline
QASSQVVMPPLVXGAQ

SEQ ID NO: 5156 - protein, 16 aa, Artificial Sequence
  source: /note="Description of Artificial Sequence: Synthetic peptide"
  MOD_RES (9)..(9): Citrulline
QVVMPPLVXGAQQIHS

SEQ ID NO: 5157 - protein, 16 aa, Artificial Sequence
  source: /note="Description of Artificial Sequence: Synthetic peptide"
  MOD_RES (5)..(5): Citrulline
  MOD_RES (14)..(14): Citrulline
PPLVXGAQQIHSIXQH

SEQ ID NO: 5158 - protein, 16 aa, Artificial Sequence
  source: /note="Description of Artificial Sequence: Synthetic peptide"
  MOD_RES (8)..(8): Citrulline
  MOD_RES (15)..(15): Citrulline
QASSQLSXGSATTPXG

SEQ ID NO: 5159 - protein, 16 aa, Artificial Sequence
  source: /note="Description of Artificial Sequence: Synthetic peptide"
  MOD_RES (4)..(4): Citrulline
  MOD_RES (11)..(11): Citrulline
QLSXGSATTPXGVLHT

SEQ ID NO: 5160 - protein, 16 aa, Artificial Sequence
  source: /note="Description of Artificial Sequence: Synthetic peptide"
  MOD_RES (5)..(5): Citrulline
  MOD_RES (9)..(9): Citrulline
TTSYXELSXGQSQFNV

SEQ ID NO: 5161 - protein, 16 aa, Artificial Sequence
  source: /note="Description of Artificial Sequence: Synthetic peptide"
  MOD_RES (8)..(8): Citrulline
  MOD_RES (10)..(10): Citrulline
EQFLSYMXAXGIKPSP

SEQ ID NO: 5162 - protein, 16 aa, Artificial Sequence
  source: /note="Description of Artificial Sequence: Synthetic peptide"
  MOD_RES (4)..(4): Citrulline
  MOD_RES (6)..(6): Citrulline
SYMXAXGIKPSPAPPP

SEQ ID NO: 5163 - protein, 16 aa, Artificial Sequence
  source: /note="Description of Artificial Sequence: Synthetic peptide"
  MOD_RES (14)..(14): Citrulline
SHETCSSKSAFLEXGE

SEQ ID NO: 5164 - protein, 16 aa, Artificial Sequence
  source: /note="Description of Artificial Sequence: Synthetic peptide"
  MOD_RES (10)..(10): Citrulline
CSSKSAFLEXGESSQG

SEQ ID NO: 5165 - protein, 16 aa, Artificial Sequence
  source: /note="Description of Artificial Sequence: Synthetic peptide"
  MOD_RES (10)..(10): Citrulline
  MOD_RES (12)..(12): Citrulline
AVQSLQLSPXTXGSWS

SEQ ID NO: 5166 - protein, 16 aa, Artificial Sequence
  source: /note="Description of Artificial Sequence: Synthetic peptide"
  MOD_RES (6)..(6): Citrulline
  MOD_RES (8)..(8): Citrulline
LQLSPXTXGSWSQPQP

SEQ ID NO: 5167 - protein, 16 aa, Artificial Sequence
  source: /note="Description of Artificial Sequence: Synthetic peptide"
  MOD_RES (2)..(2): Citrulline
  MOD_RES (4)..(4): Citrulline
PXTXGSWSQPQPLKAP

SEQ ID NO: 5168 - protein, 16 aa, Artificial Sequence
  source: /note="Description of Artificial Sequence: Synthetic peptide"
  MOD_RES (10)..(10): Citrulline
  MOD_RES (13)..(13): Citrulline
SAGENDSYSXNVXGSL

SEQ ID NO: 5169 - protein, 16 aa, Artificial Sequence
  source: /note="Description of Artificial Sequence: Synthetic peptide"
  MOD_RES (6)..(6): Citrulline
  MOD_RES (9)..(9): Citrulline
NDSYSXNVXGSLKPGT

SEQ ID NO: 5170 - protein, 16 aa, Artificial Sequence
  source: /note="Description of Artificial Sequence: Synthetic peptide"
  MOD_RES (2)..(2): Citrulline
  MOD_RES (5)..(5): Citrulline
SXNVXGSLKPGTESIS

SEQ ID NO: 5171 - protein, 16 aa, Artificial Sequence
  source: /note="Description of Artificial Sequence: Synthetic peptide"
  MOD_RES (4)..(4): Citrulline
  MOD_RES (16)..(16): Citrulline
HGQXGSGSGQSPSYGX

SEQ ID NO: 5172 - protein, 16 aa, Artificial Sequence
  source: /note="Description of Artificial Sequence: Synthetic peptide"
  MOD_RES (11)..(11): Citrulline
  MOD_RES (13)..(13): Citrulline
SGSGQSPSPSXGXHGS

SEQ ID NO: 5173 - protein, 16 aa, Artificial Sequence
  source: /note="Description of Artificial Sequence: Synthetic peptide"
  MOD_RES (7)..(7): Citrulline
  MOD_RES (9)..(9): Citrulline
QSPSPSXGXHGSGSGQ

SEQ ID NO: 5174 - protein, 16 aa, Artificial Sequence
  source: /note="Description of Artificial Sequence: Synthetic peptide"
  MOD_RES (11)..(11): Citrulline
  MOD_RES (16)..(16): Citrulline
GSGQSPGHGQXGSGSX

SEQ ID NO: 5175 - protein, 16 aa, Artificial Sequence
  source: /note="Description of Artificial Sequence: Synthetic peptide"
  MOD_RES (7)..(7): Citrulline
  MOD_RES (12)..(12): Citrulline
SPGHGQXGSGSXQSPS

SEQ ID NO: 5176 - protein, 16 aa, Artificial Sequence
  source: /note="Description of Artificial Sequence: Synthetic peptide"
  MOD_RES (11)..(11): Citrulline
STGQSSSYGHXGSGSS

SEQ ID NO: 5177 - protein, 16 aa, Artificial Sequence
  source: /note="Description of Artificial Sequence: Synthetic peptide"
  MOD_RES (7)..(7): Citrulline
SSSYGHXGSGSSQSSG

SEQ ID NO: 5178 - protein, 16 aa, Artificial Sequence
  source: /note="Description of Artificial Sequence: Synthetic peptide"
  MOD_RES (9)..(9): Citrulline
  MOD_RES (14)..(14): Citrulline
GQSPGHGQXGSGSXQS

SEQ ID NO: 5179 - protein, 16 aa, Artificial Sequence
  source: /note="Description of Artificial Sequence: Synthetic peptide"
  MOD_RES (5)..(5): Citrulline
  MOD_RES (10)..(10): Citrulline
GHGQXGSGSXQSPSYG

SEQ ID NO: 5180 - protein, 16 aa, Artificial Sequence
  source: /note="Description of Artificial Sequence: Synthetic peptide"
  MOD_RES (7)..(7): Citrulline
  MOD_RES (13)..(13): Citrulline
YEQHGSXSGQSSXGEQ

SEQ ID NO: 5181 - protein, 16 aa, Artificial Sequence
  source: /note="Description of Artificial Sequence: Synthetic peptide"
  MOD_RES (3)..(3): Citrulline
  MOD_RES (9)..(9): Citrulline
GSXSGQSSXGEQHGSS

SEQ ID NO: 5182 - protein, 16 aa, Artificial Sequence
  source: /note="Description of Artificial Sequence: Synthetic peptide"
  MOD_RES (13)..(13): Citrulline
GSSTGQSSSYGHXGSG

SEQ ID NO: 5183 - protein, 16 aa, Artificial Sequence
  source: /note="Description of Artificial Sequence: Synthetic peptide"
  MOD_RES (9)..(9): Citrulline
GQSSSYGHXGSGSSQS

SEQ ID NO: 5184 - protein, 16 aa, Artificial Sequence
  source: /note="Description of Artificial Sequence: Synthetic peptide"
  MOD_RES (5)..(5): Citrulline
SYGHXGSGSSQSSGYG

SEQ ID NO: 5185 - protein, 16 aa, Artificial Sequence
  source: /note="Description of Artificial Sequence: Synthetic peptide"
  MOD_RES (13)..(13): Citrulline
HQFATQSYIGSSXGST

SEQ ID NO: 5186 - protein, 16 aa, Artificial Sequence
  source: /note="Description of Artificial Sequence: Synthetic peptide"
  MOD_RES (9)..(9): Citrulline
TQSYIGSSXGSTIYTG

SEQ ID NO: 5187 - protein, 16 aa, Artificial Sequence
  source: /note="Description of Artificial Sequence: Synthetic peptide"
  MOD_RES (5)..(5): Citrulline
IGSSXGSTIYTGYPLS

SEQ ID NO: 5188 - protein, 16 aa, Artificial Sequence
  source: /note="Description of Artificial Sequence: Synthetic peptide"
  MOD_RES (9)..(9): Citrulline
FYNKVISSXGFPFENS

SEQ ID NO: 5189 - protein, 16 aa, Artificial Sequence
  source: /note="Description of Artificial Sequence: Synthetic peptide"
  MOD_RES (5)..(5): Citrulline
  MOD_RES (15)..(15): Citrulline
VISSXGFPFENSSSXC

SEQ ID NO: 5190 - protein, 16 aa, Artificial Sequence
  source: /note="Description of Artificial Sequence: Synthetic peptide"
  MOD_RES (12)..(12): Citrulline
MTPPISPAMASXGSVI

SEQ ID NO: 5191 - protein, 16 aa, Artificial Sequence
  source: /note="Description of Artificial Sequence: Synthetic peptide"
  MOD_RES (8)..(8): Citrulline
ISPAMASXGSVINQGP

SEQ ID NO: 5192 - protein, 16 aa, Artificial Sequence
  source: /note="Description of Artificial Sequence: Synthetic peptide"
  MOD_RES (2)..(2): Citrulline
  MOD_RES (9)..(9): Citrulline
LXGSGTPVXGLPYAMM

SEQ ID NO: 5193 - protein, 16 aa, Artificial Sequence
  source: /note="Description of Artificial Sequence: Synthetic peptide"
  MOD_RES (5)..(5): Citrulline
  MOD_RES (15)..(15): Citrulline
GTPVXGLPYAMMDKXL

SEQ ID NO: 5194 - protein, 16 aa, Artificial Sequence
  source: /note="Description of Artificial Sequence: Synthetic peptide"
  MOD_RES (9)..(9): Citrulline
AAVSGLGSXGLTLAPG

SEQ ID NO: 5195 - protein, 16 aa, Artificial Sequence
  source: /note="Description of Artificial Sequence: Synthetic peptide"
  MOD_RES (5)..(5): Citrulline
GLGSXGLTLAPGLSPA

SEQ ID NO: 5196 - protein, 16 aa, Artificial Sequence
  source: /note="Description of Artificial Sequence: Synthetic peptide"
  MOD_RES (13)..(13): Citrulline
QAAWENELQKMTXGQL

SEQ ID NO: 5197 - protein, 16 aa, Artificial Sequence
  source: /note="Description of Artificial Sequence: Synthetic peptide"
  MOD_RES (9)..(9): Citrulline
ENELQKMTXGQLQDEL

SEQ ID NO: 5198 - protein, 16 aa, Artificial Sequence
  source: /note="Description of Artificial Sequence: Synthetic peptide"
  MOD_RES (5)..(5): Citrulline
QKMTXGQLQDELEKGE

SEQ ID NO: 5199 - protein, 16 aa, Artificial Sequence
  source: /note="Description of Artificial Sequence: Synthetic peptide"
  MOD_RES (8)..(8): Citrulline
GDLLYFPXGTIHQADT

SEQ ID NO: 5200 - protein, 16 aa, Artificial Sequence
  source: /note="Description of Artificial Sequence: Synthetic peptide"
  MOD_RES (4)..(4): Citrulline
YFPXGTIHQADTPAGL

SEQ ID NO: 5201 - protein, 16 aa, Artificial Sequence
  source: /note="Description of Artificial Sequence: Synthetic peptide"
  MOD_RES (7)..(7): Citrulline
  MOD_RES (11)..(11): Citrulline
TASTLEXGTSXGAGDL

SEQ ID NO: 5202 - protein, 16 aa, Artificial Sequence
  source: /note="Description of Artificial Sequence: Synthetic peptide"
  MOD_RES (3)..(3): Citrulline
  MOD_RES (7)..(7): Citrulline
LEXGTSXGAGDLDSNP

SEQ ID NO: 5203 - protein, 16 aa, Artificial Sequence
  source: /note="Description of Artificial Sequence: Synthetic peptide"
  MOD_RES (7)..(7): Citrulline
SLGKSSXGLKIYAMEI

SEQ ID NO: 5204 - protein, 16 aa, Artificial Sequence
  source: /note="Description of Artificial Sequence: Synthetic peptide"
  MOD_RES (3)..(3): Citrulline
SSXGLKIYAMEISDNP

SEQ ID NO: 5205 - protein, 16 aa, Artificial Sequence
  source: /note="Description of Artificial Sequence: Synthetic peptide"
  MOD_RES (4)..(4): Citrulline
  MOD_RES (7)..(7): Citrulline
IEEXSLXGDVFFPKVN

SEQ ID NO: 5206 - protein, 16 aa, Artificial Sequence
  source: /note="Description of Artificial Sequence: Synthetic peptide"
  MOD_RES (3)..(3): Citrulline
SLXGDVFFPKVNEAGE

SEQ ID NO: 5207 - protein, 16 aa, Artificial Sequence
  source: /note="Description of Artificial Sequence: Synthetic peptide"
  MOD_RES (10)..(10): Citrulline
SSSPTSGSPXGSHSSA

SEQ ID NO: 5208 - protein, 16 aa, Artificial Sequence
  source: /note="Description of Artificial Sequence: Synthetic peptide"
  MOD_RES (6)..(6): Citrulline
  MOD_RES (15)..(15): Citrulline
TSGSPXGSHSSALEXL

SEQ ID NO: 5209 - protein, 16 aa, Artificial Sequence
  source: /note="Description of Artificial Sequence: Synthetic peptide"
  MOD_RES (12)..(12): Citrulline
WMIEEKATITSXGSSL

SEQ ID NO: 5210 - protein, 16 aa, Artificial Sequence
  source: /note="Description of Artificial Sequence: Synthetic peptide"
  MOD_RES (8)..(8): Citrulline
EKATITSXGSSLSGSL

SEQ ID NO: 5211 - protein, 16 aa, Artificial Sequence
  source: /note="Description of Artificial Sequence: Synthetic peptide"
  MOD_RES (12)..(13): Citrulline
AIFEAQQLAGVXXGAK

SEQ ID NO: 5212 - protein, 16 aa, Artificial Sequence
  source: /note="Description of Artificial Sequence: Synthetic peptide"
  MOD_RES (8)..(9): Citrulline
AQQLAGVXXGAKPEVP

SEQ ID NO: 5213 - protein, 16 aa, Artificial Sequence
  source: /note="Description of Artificial Sequence: Synthetic peptide"
  MOD_RES (10)..(10): Citrulline
PTGKGAGGPXGSSETV

SEQ ID NO: 5214 - protein, 16 aa, Artificial Sequence
  source: /note="Description of Artificial Sequence: Synthetic peptide"
  MOD_RES (9)..(9): Citrulline
  MOD_RES (14)..(14): Citrulline
KDGDSVLQXGGSLXAP

SEQ ID NO: 5215 - protein, 16 aa, Artificial Sequence
  source: /note="Description of Artificial Sequence: Synthetic peptide"
  MOD_RES (5)..(5): Citrulline
  MOD_RES (10)..(10): Citrulline
SVLQXGGSLXAPALPS

SEQ ID NO: 5216 - protein, 16 aa, Artificial Sequence
  source: /note="Description of Artificial Sequence: Synthetic peptide"
  MOD_RES (10)..(10): Citrulline
QEFWQMKQSXGADLKN

SEQ ID NO: 5217 - protein, 16 aa, Artificial Sequence
  source: /note="Description of Artificial Sequence: Synthetic peptide"
  MOD_RES (6)..(6): Citrulline
QMKQSXGADLKNGALV

SEQ ID NO: 5218 - protein, 16 aa, Artificial Sequence
  source: /note="Description of Artificial Sequence: Synthetic peptide"
  MOD_RES (11)..(11): Citrulline
  MOD_RES (14)..(14): Citrulline
KGWDAEGSPFXGQXFD

SEQ ID NO: 5219 - protein, 16 aa, Artificial Sequence
  source: /note="Description of Artificial Sequence: Synthetic peptide"
  MOD_RES (7)..(7): Citrulline
  MOD_RES (10)..(10): Citrulline
AEGSPFXGQXFDPAMF

SEQ ID NO: 5220 - protein, 16 aa, Artificial Sequence
  source: /note="Description of Artificial Sequence: Synthetic peptide"
  MOD_RES (7)..(7): Citrulline
  MOD_RES (11)..(11): Citrulline
SGPGSPXAMKXGVSLS

SEQ ID NO: 5221 - protein, 16 aa, Artificial Sequence
  source: /note="Description of Artificial Sequence: Synthetic peptide"
  MOD_RES (3)..(3): Citrulline
  MOD_RES (7)..(7): Citrulline
SPXAMKXGVSLSSVAS

SEQ ID NO: 5222 - protein, 16 aa, Artificial Sequence
  source: /note="Description of Artificial Sequence: Synthetic peptide"
  MOD_RES (7)..(7): Citrulline
ASCSILXGDNKQTVQL

SEQ ID NO: 5223 - protein, 16 aa, Artificial Sequence
  source: /note="Description of Artificial Sequence: Synthetic peptide"
  MOD_RES (3)..(3): Citrulline
ILXGDNKQTVQLTTEK

SEQ ID NO: 5224 - protein, 16 aa, Artificial Sequence
  source: /note="Description of Artificial Sequence: Synthetic peptide"
  MOD_RES (9)..(9): Citrulline
LEKGYLYDXGKELNCK

SEQ ID NO: 5225 - protein, 16 aa, Artificial Sequence
  source: /note="Description of Artificial Sequence: Synthetic peptide"
  MOD_RES (5)..(5): Citrulline
  MOD_RES (15)..(15): Citrulline
YLYDXGKELNCKSIXD

SEQ ID NO: 5226 - protein, 16 aa, Artificial Sequence
  source: /note="Description of Artificial Sequence: Synthetic peptide"
  MOD_RES (1)..(1): Citrulline
  MOD_RES (11)..(11): Citrulline
XLGGPTCKVSXGVAYS

SEQ ID NO: 5227 - protein, 16 aa, Artificial Sequence
  source: /note="Description of Artificial Sequence: Synthetic peptide"
  MOD_RES (4)..(4): Citrulline
  MOD_RES (9)..(9): Citrulline
APHXCLFSXGITALDG

SEQ ID NO: 5228 - protein, 16 aa, Artificial Sequence
  source: /note="Description of Artificial Sequence: Synthetic peptide"
  MOD_RES (5)..(5): Citrulline
  MOD_RES (15)..(15): Citrulline
CLFSXGITALDGLKXG

SEQ ID NO: 5229 - protein, 16 aa, Artificial Sequence
  source: /note="Description of Artificial Sequence: Synthetic peptide"
  MOD_RES (1)..(1): Citrulline
  MOD_RES (11)..(11): Citrulline
XGCNGAAHLVXGDAWK

SEQ ID NO: 5230 - protein, 16 aa, Artificial Sequence
  source: /note="Description of Artificial Sequence: Synthetic peptide"
  MOD_RES (7)..(7): Citrulline
GAAHLVXGDAWKTKLG

SEQ ID NO: 5231 - protein, 16 aa, Artificial Sequence
  source: /note="Description of Artificial Sequence: Synthetic peptide"
  MOD_RES (3)..(3): Citrulline
LVXGDAWKTKLGEPWV

SEQ ID NO: 5232 - protein, 16 aa, Artificial Sequence
  source: /note="Description of Artificial Sequence: Synthetic peptide"
  MOD_RES (10)..(11): Citrulline
LSVSQTGSWXXGMSAQ

SEQ ID NO: 5233 - protein, 16 aa, Artificial Sequence
  source: /note="Description of Artificial Sequence: Synthetic peptide"
  MOD_RES (6)..(7): Citrulline
QTGSWXXGMSAQGGAP

SEQ ID NO: 5234 - protein, 16 aa, Artificial Sequence
  source: /note="Description of Artificial Sequence: Synthetic peptide"
  MOD_RES (3)..(3): Citrulline
  MOD_RES (12)..(12): Citrulline
TGXEGQVTPLPXGTPQ

SEQ ID NO: 5235 - protein, 16 aa, Artificial Sequence
  source: /note="Description of Artificial Sequence: Synthetic peptide"
  MOD_RES (8)..(8): Citrulline
GQVTPLPXGTPQLCTA

SEQ ID NO: 5236 - protein, 16 aa, Artificial Sequence
  source: /note="Description of Artificial Sequence: Synthetic peptide"
  MOD_RES (7)..(8): Citrulline
GLGASYXXGASSFPVP

SEQ ID NO: 5237 - protein, 16 aa, Artificial Sequence
  source: /note="Description of Artificial Sequence: Synthetic peptide"
  MOD_RES (3)..(4): Citrulline
SYXXGASSFPVPPPGA

SEQ ID NO: 5238 - protein, 16 aa, Artificial Sequence
  source: /note="Description of Artificial Sequence: Synthetic peptide"
  MOD_RES (8)..(8): Citrulline
  MOD_RES (12)..(12): Citrulline
TMHAIYEXKKGXGFPQ

SEQ ID NO: 5239 - protein, 16 aa, Artificial Sequence
  source: /note="Description of Artificial Sequence: Synthetic peptide"
  MOD_RES (4)..(4): Citrulline
  MOD_RES (8)..(8): Citrulline
IYEXKKGXGFPQTFEV

SEQ ID NO: 5240 - protein, 16 aa, Artificial Sequence
  source: /note="Description of Artificial Sequence: Synthetic peptide"
  MOD_RES (4)..(4): Citrulline
  MOD_RES (16)..(16): Citrulline
KKGXGFPQTFEVGPGX

SEQ ID NO: 5241 - protein, 16 aa, Artificial Sequence
  source: /note="Description of Artificial Sequence: Synthetic peptide"
  MOD_RES (4)..(4): Citrulline
  MOD_RES (9)..(9): Citrulline
TLTXLLAAXGATIQEL

SEQ ID NO: 5242 - protein, 16 aa, Artificial Sequence
  source: /note="Description of Artificial Sequence: Synthetic peptide"
  MOD_RES (5)..(5): Citrulline
  MOD_RES (16)..(16): Citrulline
LLAAXGATIQELNTIX

SEQ ID NO: 5243 - protein, 16 aa, Artificial Sequence
  source: /note="Description of Artificial Sequence: Synthetic peptide"
  MOD_RES (12)..(12): Citrulline
AYSFYIKAYTPXGASS

SEQ ID NO: 5244 - protein, 16 aa, Artificial Sequence
  source: /note="Description of Artificial Sequence: Synthetic peptide"
  MOD_RES (8)..(8): Citrulline
YIKAYTPXGASSASVP

SEQ ID NO: 5245 - protein, 16 aa, Artificial Sequence
  source: /note="Description of Artificial Sequence: Synthetic peptide"
  MOD_RES (4)..(4): Citrulline
YTPXGASSASVPTLAS

SEQ ID NO: 5246 - protein, 16 aa, Artificial Sequence
  source: /note="Description of Artificial Sequence: Synthetic peptide"
  MOD_RES (11)..(11): Citrulline
  MOD_RES (13)..(13): Citrulline
SDNNLKDYFEXGXVDE

SEQ ID NO: 5247 - protein, 16 aa, Artificial Sequence
  source: /note="Description of Artificial Sequence: Synthetic peptide"
  MOD_RES (7)..(7): Citrulline
  MOD_RES (9)..(9): Citrulline
LKDYFEXGXVDEFTLE

SEQ ID NO: 5248 - protein, 16 aa, Artificial Sequence
  source: /note="Description of Artificial Sequence: Synthetic peptide"
  MOD_RES (6)..(6): Citrulline
  MOD_RES (10)..(10): Citrulline
KFEAHXWLAXGKEDNE

SEQ ID NO: 5249 - protein, 16 aa, Artificial Sequence
  source: /note="Description of Artificial Sequence: Synthetic peptide"
  MOD_RES (2)..(2): Citrulline
  MOD_RES (6)..(6): Citrulline
HXWLAXGKEDNELVVE

SEQ ID NO: 5250 - protein, 16 aa, Artificial Sequence
  source: /note="Description of Artificial Sequence: Synthetic peptide"
  MOD_RES (8)..(8): Citrulline
  MOD_RES (14)..(14): Citrulline
YLGKSENXTNKFEXGT

SEQ ID NO: 5251 - protein, 16 aa, Artificial Sequence
  source: /note="Description of Artificial Sequence: Synthetic peptide"
  MOD_RES (14)..(14): Citrulline
GSTGNWGCHVQTKXGN

SEQ ID NO: 5252 - protein, 16 aa, Artificial Sequence
  source: /note="Description of Artificial Sequence: Synthetic peptide"
  MOD_RES (10)..(10): Citrulline
  MOD_RES (15)..(15): Citrulline
NWGCHVQTKXGNNTXT

SEQ ID NO: 5253 - protein, 16 aa, Artificial Sequence
  source: /note="Description of Artificial Sequence: Synthetic peptide"
  MOD_RES (3)..(3): Citrulline
  MOD_RES (10)..(10): Citrulline
DFXHQILQTXGALSLQ

SEQ ID NO: 5254 - protein, 16 aa, Artificial Sequence
  source: /note="Description of Artificial Sequence: Synthetic peptide"
  MOD_RES (6)..(6): Citrulline
QILQTXGALSLQGSIM

SEQ ID NO: 5255 - protein, 16 aa, Artificial Sequence
  source: /note="Description of Artificial Sequence: Synthetic peptide"
  MOD_RES (9)..(9): Citrulline
  MOD_RES (15)..(15): Citrulline
PVNYTNWYXGEPAGXG

SEQ ID NO: 5256 - protein, 16 aa, Artificial Sequence
  source: /note="Description of Artificial Sequence: Synthetic peptide"
  MOD_RES (5)..(5): Citrulline
  MOD_RES (11)..(11): Citrulline
TNWYXGEPAGXGKEQC

SEQ ID NO: 5257 - protein, 16 aa, Artificial Sequence
  source: /note="Description of Artificial Sequence: Synthetic peptide"
  MOD_RES (2)..(2): Citrulline
TXGALSLQGSIMTVGE

SEQ ID NO: 5258 - protein, 16 aa, Artificial Sequence
  source: /note="Description of Artificial Sequence: Synthetic peptide"
  MOD_RES (13)..(13): Citrulline
KVTPAKKITFLKXGDP

SEQ ID NO: 5259 - protein, 16 aa, Artificial Sequence
  source: /note="Description of Artificial Sequence: Synthetic peptide"
  MOD_RES (9)..(9): Citrulline
  MOD_RES (13)..(13): Citrulline
AKKITFLKXGDPXFAG

SEQ ID NO: 5260 - protein, 16 aa, Artificial Sequence
  source: /note="Description of Artificial Sequence: Synthetic peptide"
  MOD_RES (8)..(8): Citrulline
KATMGATXGPIKEAFD

SEQ ID NO: 5261 - protein, 16 aa, Artificial Sequence
  source: /note="Description of Artificial Sequence: Synthetic peptide"
  MOD_RES (1)..(1): Citrulline
  MOD_RES (9)..(9): Citrulline
XVTPHPSPXGSPLPTP

SEQ ID NO: 5262 - protein, 16 aa, Artificial Sequence
  source: /note="Description of Artificial Sequence: Synthetic peptide"
  MOD_RES (5)..(5): Citrulline
HPSPXGSPLPTPKGTP

SEQ ID NO: 5263 - protein, 16 aa, Artificial Sequence
  source: /note="Description of Artificial Sequence: Synthetic peptide"
  MOD_RES (8)..(8): Citrulline
DVQKEIKXGTKLMCSL

SEQ ID NO: 5264 - protein, 16 aa, Artificial Sequence
  source: /note="Description of Artificial Sequence: Synthetic peptide"
  MOD_RES (4)..(4): Citrulline
EIKXGTKLMCSLCHCP

SEQ ID NO: 5265 - protein, 16 aa, Artificial Sequence
  source: /note="Description of Artificial Sequence: Synthetic peptide"
  MOD_RES (2)..(2): Citrulline
  MOD_RES (7)..(7): Citrulline
TXNLYAXGFHDKDKEC

SEQ ID NO: 5266 - protein, 16 aa, Artificial Sequence
  source: /note="Description of Artificial Sequence: Synthetic peptide"
  MOD_RES (3)..(3): Citrulline
  MOD_RES (15)..(15): Citrulline
YAXGFHDKDKECSCXE

SEQ ID NO: 5267 - protein, 16 aa, Artificial Sequence
  source: /note="Description of Artificial Sequence: Synthetic peptide"
  MOD_RES (12)..(12): Citrulline
  MOD_RES (14)..(14): Citrulline
MDGVTPTLSTIXGXTL

SEQ ID NO: 5268 - protein, 16 aa, Artificial Sequence
  source: /note="Description of Artificial Sequence: Synthetic peptide"
  MOD_RES (8)..(8): Citrulline
  MOD_RES (10)..(10): Citrulline
TPTLSTIXGXTLESST

SEQ ID NO: 5269 - protein, 16 aa, Artificial Sequence
  source: /note="Description of Artificial Sequence: Synthetic peptide"
  MOD_RES (9)..(9): Citrulline
  MOD_RES (15)..(15): Citrulline
YECVAENSXGKNVAXG

SEQ ID NO: 5270 - protein, 16 aa, Artificial Sequence
  source: /note="Description of Artificial Sequence: Synthetic peptide"
  MOD_RES (5)..(5): Citrulline
  MOD_RES (11)..(11): Citrulline
AENSXGKNVAXGQLTF

SEQ ID NO: 5271 - protein, 16 aa, Artificial Sequence
  source: /note="Description of Artificial Sequence: Synthetic peptide"
  MOD_RES (1)..(1): Citrulline
  MOD_RES (7)..(7): Citrulline
XGKNVAXGQLTFYAQP

SEQ ID NO: 5272 - protein, 16 aa, Artificial Sequence
  source: /note="Description of Artificial Sequence: Synthetic peptide"
  MOD_RES (8)..(8): Citrulline
KKPGLTGXGMYELKPE

SEQ ID NO: 5273 - protein, 16 aa, Artificial Sequence
  source: /note="Description of Artificial Sequence: Synthetic peptide"
  MOD_RES (4)..(4): Citrulline
LTGXGMYELKPECAKE

SEQ ID NO: 5274 - protein, 16 aa, Artificial Sequence
  source: /note="Description of Artificial Sequence: Synthetic peptide"
  MOD_RES (8)..(8): Citrulline
LAALLIEXGANLEEVN

SEQ ID NO: 5275 - protein, 16 aa, Artificial Sequence
  source: /note="Description of Artificial Sequence: Synthetic peptide"
  MOD_RES (4)..(4): Citrulline
LIEXGANLEEVNDEGY

SEQ ID NO: 5276 - protein, 16 aa, Artificial Sequence
  source: /note="Description of Artificial Sequence: Synthetic peptide"
  MOD_RES (4)..(4): Citrulline
  MOD_RES (8)..(8): Citrulline
VSHXMQPXGSFYSMVP

SEQ ID NO: 5277 - protein, 16 aa, Artificial Sequence
  source: /note="Description of Artificial Sequence: Synthetic peptide"
  MOD_RES (4)..(4): Citrulline
MQPXGSFYSMVPNATI

SEQ ID NO: 5278 - protein, 16 aa, Artificial Sequence
  source: /note="Description of Artificial Sequence: Synthetic peptide"
  MOD_RES (7)..(7): Citrulline
  MOD_RES (12)..(12): Citrulline
AAASEIXGFTKXGKQF

SEQ ID NO: 5279 - protein, 16 aa, Artificial Sequence
  source: /note="Description of Artificial Sequence: Synthetic peptide"
  MOD_RES (3)..(3): Citrulline
  MOD_RES (8)..(8): Citrulline
EIXGFTKXGKQFLSFE

SEQ ID NO: 5280 - protein, 16 aa, Artificial Sequence
  source: /note="Description of Artificial Sequence: Synthetic peptide"
  MOD_RES (4)..(4): Citrulline
FTKXGKQFLSFETNLT

SEQ ID NO: 5281 - protein, 16 aa, Artificial Sequence
  source: /note="Description of Artificial Sequence: Synthetic peptide"
  MOD_RES (8)..(8): Citrulline
  MOD_RES (10)..(10): Citrulline
GGSQVQAXGXALNIVD

SEQ ID NO: 5282 - protein, 16 aa, Artificial Sequence
  source: /note="Description of Artificial Sequence: Synthetic peptide"
  MOD_RES (4)..(4): Citrulline
  MOD_RES (6)..(6): Citrulline
VQAXGXALNIVDQEGS

SEQ ID NO: 5283 - protein, 16 aa, Artificial Sequence
  source: /note="Description of Artificial Sequence: Synthetic peptide"
  MOD_RES (14)..(14): Citrulline
LSSGSSPGSLTSSXGS

SEQ ID NO: 5284 - protein, 16 aa, Artificial Sequence
  source: /note="Description of Artificial Sequence: Synthetic peptide"
  MOD_RES (10)..(10): Citrulline
SSPGSLTSSXGSLVAS

SEQ ID NO: 5285 - protein, 16 aa, Artificial Sequence
  source: /note="Description of Artificial Sequence: Synthetic peptide"
  MOD_RES (6)..(6): Citrulline
SLTSSXGSLVASSLDS

SEQ ID NO: 5286 - protein, 16 aa, Artificial Sequence
  source: /note="Description of Artificial Sequence: Synthetic peptide"
  MOD_RES (2)..(2): Citrulline
SXGSLVASSLDSSTSA

SEQ ID NO: 5287 - protein, 16 aa, Artificial Sequence
  source: /note="Description of Artificial Sequence: Synthetic peptide"
  MOD_RES (10)..(10): Citrulline
PYCPPNGPVXGDLLEH

SEQ ID NO: 5288 - protein, 16 aa, Artificial Sequence
  source: /note="Description of Artificial Sequence: Synthetic peptide"
  MOD_RES (6)..(6): Citrulline
  MOD_RES (14)..(14): Citrulline
PNGPVXGDLLEHFXLA

SEQ ID NO: 5289 - protein, 16 aa, Artificial Sequence
  source: /note="Description of Artificial Sequence: Synthetic peptide"
  MOD_RES (3)..(3): Citrulline
  MOD_RES (11)..(11): Citrulline
PTXSEWETLSXGYKQQ

SEQ ID NO: 5290 - protein, 16 aa, Artificial Sequence
  source: /note="Description of Artificial Sequence: Synthetic peptide"
  MOD_RES (7)..(7): Citrulline
EWETLSXGYKQQLVEK

SEQ ID NO: 5291 - protein, 16 aa, Artificial Sequence
  source: /note="Description of Artificial Sequence: Synthetic peptide"
  MOD_RES (11)..(11): Citrulline
DGFKPCQPCPXGTYQP

SEQ ID NO: 5292 - protein, 16 aa, Artificial Sequence
  source: /note="Description of Artificial Sequence: Synthetic peptide"
  MOD_RES (7)..(7): Citrulline
  MOD_RES (16)..(16): Citrulline
PCQPCPXGTYQPEAGX

SEQ ID NO: 5293 - protein, 16 aa, Artificial Sequence
  source: /note="Description of Artificial Sequence: Synthetic peptide"
  MOD_RES (6)..(6): Citrulline
  MOD_RES (12)..(12): Citrulline
MFGASXGYFPPXDFPG

SEQ ID NO: 5294 - protein, 16 aa, Artificial Sequence
  source: /note="Description of Artificial Sequence: Synthetic peptide"
  MOD_RES (12)..(12): Citrulline
  MOD_RES (15)..(15): Citrulline
AEVTQDPAPLLXGFXK

SEQ ID NO: 5295 - protein, 16 aa, Artificial Sequence
  source: /note="Description of Artificial Sequence: Synthetic peptide"
  MOD_RES (8)..(8): Citrulline
  MOD_RES (11)..(11): Citrulline
QDPAPLLXGFXKPATG

SEQ ID NO: 5296 - protein, 16 aa, Artificial Sequence
  source: /note="Description of Artificial Sequence: Synthetic peptide"
  MOD_RES (13)..(13): Citrulline
LIGPALPPGFKAXGTA

SEQ ID NO: 5297 - protein, 16 aa, Artificial Sequence
  source: /note="Description of Artificial Sequence: Synthetic peptide"
  MOD_RES (9)..(9): Citrulline
ALPPGFKAXGTAEDEE

SEQ ID NO: 5298 - protein, 16 aa, Artificial Sequence
  source: /note="Description of Artificial Sequence: Synthetic peptide"
  MOD_RES (5)..(5): Citrulline
  MOD_RES (13)..(13): Citrulline
GFKAXGTAEDEEXDPS

SEQ ID NO: 5299 - protein, 16 aa, Artificial Sequence
  source: /note="Description of Artificial Sequence: Synthetic peptide"
  MOD_RES (12)..(12): Citrulline
  MOD_RES (16)..(16): Citrulline
PIGTKPSSSSQXGSLX

SEQ ID NO: 5300 - protein, 16 aa, Artificial Sequence
  source: /note="Description of Artificial Sequence: Synthetic peptide"
  MOD_RES (8)..(8): Citrulline
  MOD_RES (12)..(12): Citrulline
KPSSSSQXGSLXKVAT

SEQ ID NO: 5301 - protein, 16 aa, Artificial Sequence
  source: /note="Description of Artificial Sequence: Synthetic peptide"
  MOD_RES (15)..(15): Citrulline
NFQVLCTGKAGFSQXG

SEQ ID NO: 5302 - protein, 16 aa, Artificial Sequence
  source: /note="Description of Artificial Sequence: Synthetic peptide"
  MOD_RES (11)..(11): Citrulline
  MOD_RES (14)..(14): Citrulline
LCTGKAGFSQXGIXLH

SEQ ID NO: 5303 - protein, 16 aa, Artificial Sequence
  source: /note="Description of Artificial Sequence: Synthetic peptide"
  MOD_RES (7)..(7): Citrulline
SASGAQXGSLEEFEET

SEQ ID NO: 5304 - protein, 16 aa, Artificial Sequence
  source: /note="Description of Artificial Sequence: Synthetic peptide"
  MOD_RES (6)..(6): Citrulline
  MOD_RES (9)..(9): Citrulline
VAVCTXFVXGTCKKTD

SEQ ID NO: 5305 - protein, 16 aa, Artificial Sequence
  source: /note="Description of Artificial Sequence: Synthetic peptide"
  MOD_RES (2)..(2): Citrulline
  MOD_RES (5)..(5): Citrulline
TXFVXGTCKKTDGTCP

SEQ ID NO: 5306 - protein, 16 aa, Artificial Sequence
  source: /note="Description of Artificial Sequence: Synthetic peptide"
  MOD_RES (2)..(2): Citrulline
  MOD_RES (7)..(7): Citrulline
LXSVIQXGSGKKELVG

SEQ ID NO: 5307 - protein, 16 aa, Artificial Sequence
  source: /note="Description of Artificial Sequence: Synthetic peptide"
  MOD_RES (3)..(3): Citrulline
  MOD_RES (16)..(16): Citrulline
IQXGSGKKELVGEYGX

SEQ ID NO: 5308 - protein, 16 aa, Artificial Sequence
  source: /note="Description of Artificial Sequence: Synthetic peptide"
  MOD_RES (12)..(12): Citrulline
SGKKELVGEYGXGDLI

SEQ ID NO: 5309 - protein, 16 aa, Artificial Sequence
  source: /note="Description of Artificial Sequence: Synthetic peptide"
  MOD_RES (8)..(8): Citrulline
ELVGEYGXGDLIGVVE

SEQ ID NO: 5310 - protein, 16 aa, Artificial Sequence
  source: /note="Description of Artificial Sequence: Synthetic peptide"
  MOD_RES (4)..(4): Citrulline
  MOD_RES (16)..(16): Citrulline
EYGXGDLIGVVEALTX

SEQ ID NO: 5311 - protein, 16 aa, Artificial Sequence
  source: /note="Description of Artificial Sequence: Synthetic peptide"
  MOD_RES (10)..(10): Citrulline
GKAVFGGWSXGNVIEK

SEQ ID NO: 5312 - protein, 16 aa, Artificial Sequence
  source: /note="Description of Artificial Sequence: Synthetic peptide"
  MOD_RES (6)..(6): Citrulline
FGGWSXGNVIEKMLTD

SEQ ID NO: 5313 - protein, 16 aa, Artificial Sequence
  source: /note="Description of Artificial Sequence: Synthetic peptide"
  MOD_RES (8)..(8): Citrulline
  MOD_RES (10)..(10): Citrulline
LSQKFDNXGXKMSLNA

SEQ ID NO: 5314 - protein, 16 aa, Artificial Sequence
  source: /note="Description of Artificial Sequence: Synthetic peptide"
  MOD_RES (7)..(8): Citrulline
SESPVHXXGSFPLAAA

SEQ ID NO: 5315 - protein, 16 aa, Artificial Sequence
  source: /note="Description of Artificial Sequence: Synthetic peptide"
  MOD_RES (3)..(4): Citrulline
VHXXGSFPLAAAGPSQ

SEQ ID NO: 5316 - protein, 16 aa, Artificial Sequence
  source: /note="Description of Artificial Sequence: Synthetic peptide"
  MOD_RES (10)..(10): Citrulline
EAKAQSQFFXGQQQQQ

SEQ ID NO: 5317 - protein, 15 aa, Artificial Sequence
  source: /note="Description of Artificial Sequence: Synthetic peptide"
  MOD_RES (6)..(6): Citrulline
QSQFFXGQQQQQQQQ

SEQ ID NO: 5318 - protein, 16 aa, Artificial Sequence
  source: /note="Description of Artificial Sequence: Synthetic peptide"
  MOD_RES (12)..(12): Citrulline
  MOD_RES (14)..(14): Citrulline
LFWPSMASLPSXGXLS

SEQ ID NO: 5319 - protein, 16 aa, Artificial Sequence
  source: /note="Description of Artificial Sequence: Synthetic peptide"
  MOD_RES (8)..(8): Citrulline
  MOD_RES (10)..(10): Citrulline
SMASLPSXGXLSTTPA

SEQ ID NO: 5320 - protein, 16 aa, Artificial Sequence
  source: /note="Description of Artificial Sequence: Synthetic peptide"
  MOD_RES (10)..(10): Citrulline
LGPPQGGSPXGSHHTS

SEQ ID NO: 5321 - protein, 16 aa, Artificial Sequence
  source: /note="Description of Artificial Sequence: Synthetic peptide"
  MOD_RES (6)..(6): Citrulline
QGGSPXGSHHTSGSSL

SEQ ID NO: 5322 - protein, 16 aa, Artificial Sequence
  source: /note="Description of Artificial Sequence: Synthetic peptide"
  MOD_RES (2)..(2): Citrulline
  MOD_RES (16)..(16): Citrulline
PXGSHHTSGSSLSTPX

SEQ ID NO: 5323 - protein, 16 aa, Artificial Sequence
  source: /note="Description of Artificial Sequence: Synthetic peptide"
  MOD_RES (7)..(7): Citrulline
  MOD_RES (14)..(14): Citrulline
LDTTPIXGSCTTQXKL

SEQ ID NO: 5324 - protein, 16 aa, Artificial Sequence
  source: /note="Description of Artificial Sequence: Synthetic peptide"
  MOD_RES (3)..(3): Citrulline
  MOD_RES (10)..(10): Citrulline
PIXGSCTTQXKLQEKS

SEQ ID NO: 5325 - protein, 16 aa, Artificial Sequence
  source: /note="Description of Artificial Sequence: Synthetic peptide"
  MOD_RES (11)..(11): Citrulline
TFPVKSQQLSXGADLA

SEQ ID NO: 5326 - protein, 16 aa, Artificial Sequence
  source: /note="Description of Artificial Sequence: Synthetic peptide"
  MOD_RES (9)..(9): Citrulline
  MOD_RES (11)..(11): Citrulline
PHSGEGHEXGXGNSKM

SEQ ID NO: 5327 - protein, 16 aa, Artificial Sequence
  source: /note="Description of Artificial Sequence: Synthetic peptide"
  MOD_RES (5)..(5): Citrulline
  MOD_RES (7)..(7): Citrulline
EGHEXGXGNSKMKACN

SEQ ID NO: 5328 - protein, 16 aa, Artificial Sequence
  source: /note="Description of Artificial Sequence: Synthetic peptide"
  MOD_RES (1)..(1): Citrulline
  MOD_RES (3)..(3): Citrulline
XGXGNSKMKACNNYQY

SEQ ID NO: 5329 - protein, 16 aa, Artificial Sequence
  source: /note="Description of Artificial Sequence: Synthetic peptide"
  MOD_RES (6)..(7): Citrulline
TLELQXXGSTTSIPSP

SEQ ID NO: 5330 - protein, 16 aa, Artificial Sequence
  source: /note="Description of Artificial Sequence: Synthetic peptide"
  MOD_RES (2)..(3): Citrulline
QXXGSTTSIPSPQSDG

SEQ ID NO: 5331 - protein, 16 aa, Artificial Sequence
  source: /note="Description of Artificial Sequence: Synthetic peptide"
  MOD_RES (9)..(9): Citrulline
EDVSEGLKXGTLIQGV

SEQ ID NO: 5332 - protein, 16 aa, Artificial Sequence
  source: /note="Description of Artificial Sequence: Synthetic peptide"
  MOD_RES (8)..(8): Citrulline
WPFSLLVXGGPLPEGL

SEQ ID NO: 5333 - protein, 16 aa, Artificial Sequence
  source: /note="Description of Artificial Sequence: Synthetic peptide"
  MOD_RES (4)..(4): Citrulline
LLVXGGPLPEGLLSED

SEQ ID NO: 5334 - protein, 16 aa, Artificial Sequence
  source: /note="Description of Artificial Sequence: Synthetic peptide"
  MOD_RES (6)..(6): Citrulline
FNMNIXGDIGHKAYEY

SEQ ID NO: 5335 - protein, 16 aa, Artificial Sequence
  source: /note="Description of Artificial Sequence: Synthetic peptide"
  MOD_RES (2)..(2): Citrulline
IXGDIGHKAYEYQEYG

SEQ ID NO: 5336 - protein, 16 aa, Artificial Sequence
  source: /note="Description of Artificial Sequence: Synthetic peptide"
  MOD_RES (9)..(9): Citrulline
GAAAALGVXGALEGLP

SEQ ID NO: 5337 - protein, 16 aa, Artificial Sequence
  source: /note="Description of Artificial Sequence: Synthetic peptide"
  MOD_RES (5)..(5): Citrulline
  MOD_RES (13)..(13): Citrulline
ALGVXGALEGLPXPPP

SEQ ID NO: 5338 - protein, 16 aa, Artificial Sequence
  source: /note="Description of Artificial Sequence: Synthetic peptide"
  MOD_RES (12)..(12): Citrulline
IFESDFIQITKXGEVI

SEQ ID NO: 5339 - protein, 16 aa, Artificial Sequence
  source: /note="Description of Artificial Sequence: Synthetic peptide"
  MOD_RES (8)..(8): Citrulline
DFIQITKXGEVIDVHN

SEQ ID NO: 5340 - protein, 16 aa, Artificial Sequence
  source: /note="Description of Artificial Sequence: Synthetic peptide"
  MOD_RES (10)..(11): Citrulline
DSGEENAHPXXGQIID

SEQ ID NO: 5341 - protein, 16 aa, Artificial Sequence
  source: /note="Description of Artificial Sequence: Synthetic peptide"
  MOD_RES (6)..(7): Citrulline
ENAHPXXGQIIDFQGL

SEQ ID NO: 5342 - protein, 16 aa, Artificial Sequence
  source: /note="Description of Artificial Sequence: Synthetic peptide"
  MOD_RES (2)..(3): Citrulline
PXXGQIIDFQGLLTDA

SEQ ID NO: 5343 - protein, 16 aa, Artificial Sequence
  source: /note="Description of Artificial Sequence: Synthetic peptide"
  MOD_RES (1)..(1): Citrulline
  MOD_RES (9)..(9): Citrulline
XGWSCVSSXGQDKGGL

SEQ ID NO: 5344 - protein, 16 aa, Artificial Sequence
  source: /note="Description of Artificial Sequence: Synthetic peptide"
  MOD_RES (5)..(5): Citrulline
CVSSXGQDKGGLPLAA

SEQ ID NO: 5345 - protein, 16 aa, Artificial Sequence
  source: /note="Description of Artificial Sequence: Synthetic peptide"
  MOD_RES (9)..(9): Citrulline
KFSEFLSLXGKLVKEV

SEQ ID NO: 5346 - protein, 16 aa, Artificial Sequence
  source: /note="Description of Artificial Sequence: Synthetic peptide"
  MOD_RES (5)..(5): Citrulline
  MOD_RES (15)..(15): Citrulline
FLSLXGKLVKEVTSXA

SEQ ID NO: 5347 - protein, 16 aa, Artificial Sequence
  source: /note="Description of Artificial Sequence: Synthetic peptide"
  MOD_RES (10)..(10): Citrulline
  MOD_RES (12)..(12): Citrulline
YNSVAWGPSXGXGGYI

SEQ ID NO: 5348 - protein, 16 aa, Artificial Sequence
  source: /note="Description of Artificial Sequence: Synthetic peptide"
  MOD_RES (6)..(6): Citrulline
  MOD_RES (8)..(8): Citrulline
AWGPSXGXGGYIPKTN

SEQ ID NO: 5349 - protein, 16 aa, Artificial Sequence
  source: /note="Description of Artificial Sequence: Synthetic peptide"
  MOD_RES (10)..(10): Citrulline
  MOD_RES (13)..(13): Citrulline
PALGSLPAGXGPXGTV

SEQ ID NO: 5350 - protein, 16 aa, Artificial Sequence
  source: /note="Description of Artificial Sequence: Synthetic peptide"
  MOD_RES (6)..(6): Citrulline
  MOD_RES (9)..(9): Citrulline
SLPAGXGPXGTVAPAT

SEQ ID NO: 5351 - protein, 16 aa, Artificial Sequence
  source: /note="Description of Artificial Sequence: Synthetic peptide"
  MOD_RES (2)..(2): Citrulline
  MOD_RES (5)..(5): Citrulline
GXGPXGTVAPATPTKP

SEQ ID NO: 5352 - protein, 16 aa, Artificial Sequence
  source: /note="Description of Artificial Sequence: Synthetic peptide"
  MOD_RES (7)..(7): Citrulline
  MOD_RES (10)..(10): Citrulline
PGIPGAXGPXGPPGPY

SEQ ID NO: 5353 - protein, 16 aa, Artificial Sequence
  source: /note="Description of Artificial Sequence: Synthetic peptide"
  MOD_RES (3)..(3): Citrulline
  MOD_RES (6)..(6): Citrulline
GAXGPXGPPGPYGNPG

SEQ ID NO: 5354 - protein, 16 aa, Artificial Sequence
  source: /note="Description of Artificial Sequence: Synthetic peptide"
  MOD_RES (12)..(12): Citrulline
GPVGDPGPKGSXGYIG

SEQ ID NO: 5355 - protein, 16 aa, Artificial Sequence
  source: /note="Description of Artificial Sequence: Synthetic peptide"
  MOD_RES (8)..(8): Citrulline
DPGPKGSXGYIGLPGL

SEQ ID NO: 5356 - protein, 16 aa, Artificial Sequence
  source: /note="Description of Artificial Sequence: Synthetic peptide"
  MOD_RES (8)..(8): Citrulline
  MOD_RES (14)..(14): Citrulline
QQGVAGEXGHLGSXGF

SEQ ID NO: 5357 - protein, 16 aa, Artificial Sequence
  source: /note="Description of Artificial Sequence: Synthetic peptide"
  MOD_RES (4)..(4): Citrulline
  MOD_RES (10)..(10): Citrulline
AGEXGHLGSXGFPGIP

SEQ ID NO: 5358 - protein, 16 aa, Artificial Sequence
  source: /note="Description of Artificial Sequence: Synthetic peptide"
  MOD_RES (11)..(11): Citrulline
PPGTPGPKGSXGSLGP

SEQ ID NO: 5359 - protein, 16 aa, Artificial Sequence
  source: /note="Description of Artificial Sequence: Synthetic peptide"
  MOD_RES (7)..(7): Citrulline
PGPKGSXGSLGPTGAP

SEQ ID NO: 5360 - protein, 16 aa, Artificial Sequence
  source: /note="Description of Artificial Sequence: Synthetic peptide"
  MOD_RES (1)..(1): Citrulline
  MOD_RES (13)..(13): Citrulline
XGVQGLQGLPGPXGVV

SEQ ID NO: 5361 - protein, 16 aa, Artificial Sequence
  source: /note="Description of Artificial Sequence: Synthetic peptide"
  MOD_RES (9)..(9): Citrulline
  MOD_RES (14)..(14): Citrulline
GLQGLPGPXGVVGXQG

SEQ ID NO: 5362 - protein, 16 aa, Artificial Sequence
  source: /note="Description of Artificial Sequence: Synthetic peptide"
  MOD_RES (5)..(5): Citrulline
  MOD_RES (10)..(10): Citrulline
LPGPXGVVGXQGLEGI

SEQ ID NO: 5363 - protein, 16 aa, Artificial Sequence
  source: /note="Description of Artificial Sequence: Synthetic peptide"
  MOD_RES (6)..(6): Citrulline
  MOD_RES (15)..(15): Citrulline
GDKGSXGDWGLQGPXG

SEQ ID NO: 5364 - protein, 16 aa, Artificial Sequence
  source: /note="Description of Artificial Sequence: Synthetic peptide"
  MOD_RES (2)..(2): Citrulline
  MOD_RES (11)..(11): Citrulline
SXGDWGLQGPXGPPGP

SEQ ID NO: 5365 - protein, 16 aa, Artificial Sequence
  source: /note="Description of Artificial Sequence: Synthetic peptide"
  MOD_RES (8)..(8): Citrulline
  MOD_RES (15)..(15): Citrulline
PHNIGTSXGVQNASXT

SEQ ID NO: 5366 - protein, 16 aa, Artificial Sequence
  source: /note="Description of Artificial Sequence: Synthetic peptide"
  MOD_RES (7)..(7): Citrulline
  MOD_RES (10)..(10): Citrulline
HGSNSQXISXGKSLET

SEQ ID NO: 5367 - protein, 16 aa, Artificial Sequence
  source: /note="Description of Artificial Sequence: Synthetic peptide"
  MOD_RES (3)..(3): Citrulline
  MOD_RES (6)..(6): Citrulline
SQXISXGKSLETLTQD

SEQ ID NO: 5368 - protein, 16 aa, Artificial Sequence
  source: /note="Description of Artificial Sequence: Synthetic peptide"
  MOD_RES (14)..(14): Citrulline
VIYTCEFISAYGAXGS

SEQ ID NO: 5369 - protein, 16 aa, Artificial Sequence
  source: /note="Description of Artificial Sequence: Synthetic peptide"
  MOD_RES (10)..(10): Citrulline
CEFISAYGAXGSANIK

SEQ ID NO: 5370 - protein, 16 aa, Artificial Sequence
  source: /note="Description of Artificial Sequence: Synthetic peptide"
  MOD_RES (9)..(9): Citrulline
KNSFISYSXGTPSLEM

SEQ ID NO: 5371 - protein, 16 aa, Artificial Sequence
  source: /note="Description of Artificial Sequence: Synthetic peptide"
  MOD_RES (5)..(5): Citrulline
ISYSXGTPSLEMTDTG

SEQ ID NO: 5372 - protein, 16 aa, Artificial Sequence
  source: /note="Description of Artificial Sequence: Synthetic peptide"
  MOD_RES (10)..(10): Citrulline
DIKGSWSNKXGKENYN

SEQ ID NO: 5373 - protein, 16 aa, Artificial Sequence
  source: /note="Description of Artificial Sequence: Synthetic peptide"
  MOD_RES (6)..(6): Citrulline
SWSNKXGKENYNPYSY

SEQ ID NO: 5374 - protein, 16 aa, Artificial Sequence
  source: /note="Description of Artificial Sequence: Synthetic peptide"
  MOD_RES (7)..(7): Citrulline
NDSAFFXGEIMFQYDK

SEQ ID NO: 5375 - protein, 16 aa, Artificial Sequence
  source: /note="Description of Artificial Sequence: Synthetic peptide"
  MOD_RES (3)..(3): Citrulline
FFXGEIMFQYDKESTV

SEQ ID NO: 5376 - protein, 16 aa, Artificial Sequence
  source: /note="Description of Artificial Sequence: Synthetic peptide"
  MOD_RES (9)..(9): Citrulline
AHEKKCISXGEALAPT

SEQ ID NO: 5377 - protein, 16 aa, Artificial Sequence
  source: /note="Description of Artificial Sequence: Synthetic peptide"
  MOD_RES (5)..(5): Citrulline
KCISXGEALAPTTQSK

SEQ ID NO: 5378 - protein, 16 aa, Artificial Sequence
  source: /note="Description of Artificial Sequence: Synthetic peptide"
  MOD_RES (5)..(5): Citrulline
  MOD_RES (12)..(12): Citrulline
LQFKXGLLHEFXKGNA

SEQ ID NO: 5379 - protein, 16 aa, Artificial Sequence
  source: /note="Description of Artificial Sequence: Synthetic peptide"
  MOD_RES (1)..(1): Citrulline
  MOD_RES (8)..(8): Citrulline
XGLLHEFXKGNASKEQ

SEQ ID NO: 5380 - protein, 16 aa, Artificial Sequence
  source: /note="Description of Artificial Sequence: Synthetic peptide"
  MOD_RES (11)..(11): Citrulline
VKKLVHFFMSXGQLKE

SEQ ID NO: 5381 - protein, 16 aa, Artificial Sequence
  source: /note="Description of Artificial Sequence: Synthetic peptide"
  MOD_RES (7)..(7): Citrulline
VHFFMSXGQLKEALLV

SEQ ID NO: 5382 - protein, 16 aa, Artificial Sequence
  source: /note="Description of Artificial Sequence: Synthetic peptide"
  MOD_RES (3)..(3): Citrulline
MSXGQLKEALLVAQAA

SEQ ID NO: 5383 - protein, 16 aa, Artificial Sequence
  source: /note="Description of Artificial Sequence: Synthetic peptide"
  MOD_RES (3)..(3): Citrulline
  MOD_RES (7)..(7): Citrulline
QYXWAKXGQIIKEASG

SEQ ID NO: 5384 - protein, 16 aa, Artificial Sequence
  source: /note="Description of Artificial Sequence: Synthetic peptide"
  MOD_RES (7)..(7): Citrulline
TIVWMKXGSGVVLSNE

SEQ ID NO: 5385 - protein, 16 aa, Artificial Sequence
  source: /note="Description of Artificial Sequence: Synthetic peptide"
  MOD_RES (5)..(5): Citrulline
  MOD_RES (9)..(9): Citrulline
ELCEXEFQXGSLSDSS

SEQ ID NO: 5386 - protein, 16 aa, Artificial Sequence
  source: /note="Description of Artificial Sequence: Synthetic peptide"
  MOD_RES (1)..(1): Citrulline
  MOD_RES (5)..(5): Citrulline
XEFQXGSLSDSSSFLD

SEQ ID NO: 5387 - protein, 16 aa, Artificial Sequence
  source: /note="Description of Artificial Sequence: Synthetic peptide"
  MOD_RES (4)..(4): Citrulline
  MOD_RES (8)..(8): Citrulline
LCQXFSKXGSPEMVNY

SEQ ID NO: 5388 - protein, 16 aa, Artificial Sequence
  source: /note="Description of Artificial Sequence: Synthetic peptide"
  MOD_RES (4)..(4): Citrulline
FSKXGSPEMVNYEKLL

SEQ ID NO: 5389 - protein, 16 aa, Artificial Sequence
  source: /note="Description of Artificial Sequence: Synthetic peptide"
  MOD_RES (10)..(10): Citrulline
FVEIQALPSXGAMTLQ

SEQ ID NO: 5390 - protein, 16 aa, Artificial Sequence
  source: /note="Description of Artificial Sequence: Synthetic peptide"
  MOD_RES (6)..(6): Citrulline
QALPSXGAMTLQPFSF

SEQ ID NO: 5391 - protein, 16 aa, Artificial Sequence
  source: /note="Description of Artificial Sequence: Synthetic peptide"
  MOD_RES (12)..(12): Citrulline
  MOD_RES (15)..(15): Citrulline
YPVVNTNYGKIXGLXT

SEQ ID NO: 5392 - protein, 16 aa, Artificial Sequence
  source: /note="Description of Artificial Sequence: Synthetic peptide"
  MOD_RES (8)..(8): Citrulline
  MOD_RES (11)..(11): Citrulline
NTNYGKIXGLXTPLPN

SEQ ID NO: 5393 - protein, 16 aa, Artificial Sequence
  source: /note="Description of Artificial Sequence: Synthetic peptide"
  MOD_RES (4)..(4): Citrulline
  MOD_RES (10)..(10): Citrulline
ELNXQSMEAXGKLLQL

SEQ ID NO: 5394 - protein, 16 aa, Artificial Sequence
  source: /note="Description of Artificial Sequence: Synthetic peptide"
  MOD_RES (6)..(6): Citrulline
QSMEAXGKLLQLIEQQ

SEQ ID NO: 5395 - protein, 16 aa, Artificial Sequence
  source: /note="Description of Artificial Sequence: Synthetic peptide"
  MOD_RES (2)..(2): Citrulline
AXGKLLQLIEQQKLVG

SEQ ID NO: 5396 - protein, 16 aa, Artificial Sequence
  source: /note="Description of Artificial Sequence: Synthetic peptide"
  MOD_RES (12)..(12): Citrulline
  MOD_RES (16)..(16): Citrulline
VGTDFNGVAAVXGTQX

SEQ ID NO: 5397 - protein, 16 aa, Artificial Sequence
  source: /note="Description of Artificial Sequence: Synthetic peptide"
  MOD_RES (8)..(8): Citrulline
  MOD_RES (12)..(12): Citrulline
FNGVAAVXGTQXAVGV

SEQ ID NO: 5398 - protein, 16 aa, Artificial Sequence
  source: /note="Description of Artificial Sequence: Synthetic peptide"
  MOD_RES (13)..(13): Citrulline
TGTLPNGTLYAAXGSQ

SEQ ID NO: 5399 - protein, 16 aa, Artificial Sequence
  source: /note="Description of Artificial Sequence: Synthetic peptide"
  MOD_RES (9)..(9): Citrulline
PNGTLYAAXGSQVDFS

SEQ ID NO: 5400 - protein, 16 aa, Artificial Sequence
  source: /note="Description of Artificial Sequence: Synthetic peptide"
  MOD_RES (5)..(5): Citrulline
LYAAXGSQVDFSCNSS

SEQ ID NO: 5401 - protein, 16 aa, Artificial Sequence
  source: /note="Description of Artificial Sequence: Synthetic peptide"
  MOD_RES (7)..(7): Citrulline
  MOD_RES (9)..(9): Citrulline
HHVEDSXHXGSKEPLP

SEQ ID NO: 5402 - protein, 16 aa, Artificial Sequence
  source: /note="Description of Artificial Sequence: Synthetic peptide"
  MOD_RES (3)..(3): Citrulline
  MOD_RES (5)..(5): Citrulline
DSXHXGSKEPLPGHGL

SEQ ID NO: 5403 - protein, 16 aa, Artificial Sequence
  source: /note="Description of Artificial Sequence: Synthetic peptide"
  MOD_RES (11)..(11): Citrulline
  MOD_RES (15)..(15): Citrulline
PAHKHHSQALXGSSXE

SEQ ID NO: 5404 - protein, 16 aa, Artificial Sequence
  source: /note="Description of Artificial Sequence: Synthetic peptide"
  MOD_RES (7)..(7): Citrulline
  MOD_RES (11)..(11): Citrulline
HHSQALXGSSXETTAL

SEQ ID NO: 5405 - protein, 16 aa, Artificial Sequence
  source: /note="Description of Artificial Sequence: Synthetic peptide"
  MOD_RES (11)..(11): Citrulline
QGLSDMLPTTXGAGMV

SEQ ID NO: 5406 - protein, 16 aa, Artificial Sequence
  source: /note="Description of Artificial Sequence: Synthetic peptide"
  MOD_RES (7)..(7): Citrulline
DMLPTTXGAGMVVDWE

SEQ ID NO: 5407 - protein, 16 aa, Artificial Sequence
  source: /note="Description of Artificial Sequence: Synthetic peptide"
  MOD_RES (11)..(11): Citrulline
SKHIFEMESVXGQLQT

SEQ ID NO: 5408 - protein, 16 aa, Artificial Sequence
  source: /note="Description of Artificial Sequence: Synthetic peptide"
  MOD_RES (7)..(7): Citrulline
FEMESVXGQLQTMLQT

SEQ ID NO: 5409 - protein, 16 aa, Artificial Sequence
  source: /note="Description of Artificial Sequence: Synthetic peptide"
  MOD_RES (3)..(3): Citrulline
  MOD_RES (13)..(13): Citrulline
GTXFSEVQALPSXGSL

SEQ ID NO: 5410 - protein, 16 aa, Artificial Sequence
  source: /note="Description of Artificial Sequence: Synthetic peptide"
  MOD_RES (9)..(9): Citrulline
SEVQALPSXGSLALQP

SEQ ID NO: 5411 - protein, 16 aa, Artificial Sequence
  source: /note="Description of Artificial Sequence: Synthetic peptide"
  MOD_RES (11)..(11): Citrulline
VFNENFPYLLXGSDES

SEQ ID NO: 5412 - protein, 16 aa, Artificial Sequence
  source: /note="Description of Artificial Sequence: Synthetic peptide"
  MOD_RES (7)..(7): Citrulline
NFPYLLXGSDESPKVI

SEQ ID NO: 5413 - protein, 16 aa, Artificial Sequence
  source: /note="Description of Artificial Sequence: Synthetic peptide"
  MOD_RES (9)..(9): Citrulline
  MOD_RES (15)..(15): Citrulline
QGFCLNVVXGCLSSXG

SEQ ID NO: 5414 - protein, 16 aa, Artificial Sequence
  source: /note="Description of Artificial Sequence: Synthetic peptide"
  MOD_RES (5)..(5): Citrulline
  MOD_RES (11)..(11): Citrulline
LNVVXGCLSSXGLEPD

SEQ ID NO: 5415 - protein, 16 aa, Artificial Sequence
  source: /note="Description of Artificial Sequence: Synthetic peptide"
  MOD_RES (1)..(1): Citrulline
  MOD_RES (7)..(7): Citrulline
XGCLSSXGLEPDWGNY

SEQ ID NO: 5416 - protein, 16 aa, Artificial Sequence
  source: /note="Description of Artificial Sequence: Synthetic peptide"
  MOD_RES (14)..(14): Citrulline
SFGYNDCEKSFLQXGG

SEQ ID NO: 5417 - protein, 16 aa, Artificial Sequence
  source: /note="Description of Artificial Sequence: Synthetic peptide"
  MOD_RES (10)..(10): Citrulline
NDCEKSFLQXGGLITH

SEQ ID NO: 5418 - protein, 16 aa, Artificial Sequence
  source: /note="Description of Artificial Sequence: Synthetic peptide"
  MOD_RES (13)..(13): Citrulline
ESITTKVETNQTXGSL

SEQ ID NO: 5419 - protein, 16 aa, Artificial Sequence
  source: /note="Description of Artificial Sequence: Synthetic peptide"
  MOD_RES (9)..(9): Citrulline
TKVETNQTXGSLSPEP

SEQ ID NO: 5420 - protein, 16 aa, Artificial Sequence
  source: /note="Description of Artificial Sequence: Synthetic peptide"
  MOD_RES (5)..(5): Citrulline
TNQTXGSLSPEPTHLL

SEQ ID NO: 5421 - protein, 16 aa, Artificial Sequence
  source: /note="Description of Artificial Sequence: Synthetic peptide"
  MOD_RES (10)..(10): Citrulline
  MOD_RES (13)..(13): Citrulline
WKQELPLSFXMSXGET

SEQ ID NO: 5422 - protein, 16 aa, Artificial Sequence
  source: /note="Description of Artificial Sequence: Synthetic peptide"
  MOD_RES (6)..(6): Citrulline
  MOD_RES (9)..(9): Citrulline
LPLSFXMSXGETKWEG

SEQ ID NO: 5423 - protein, 16 aa, Artificial Sequence
  source: /note="Description of Artificial Sequence: Synthetic peptide"
  MOD_RES (2)..(2): Citrulline
  MOD_RES (5)..(5): Citrulline
FXMSXGETKWEGKAYL

SEQ ID NO: 5424 - protein, 16 aa, Artificial Sequence
  source: /note="Description of Artificial Sequence: Synthetic peptide"
  MOD_RES (1)..(1): Citrulline
  MOD_RES (10)..(10): Citrulline
XNTIFTLGTXGSVISP

SEQ ID NO: 5425 - protein, 16 aa, Artificial Sequence
  source: /note="Description of Artificial Sequence: Synthetic peptide"
  MOD_RES (6)..(6): Citrulline
FTLGTXGSVISPTELE

SEQ ID NO: 5426 - protein, 16 aa, Artificial Sequence
  source: /note="Description of Artificial Sequence: Synthetic peptide"
  MOD_RES (2)..(2): Citrulline
TXGSVISPTELEAPIL

SEQ ID NO: 5427 - protein, 16 aa, Artificial Sequence
  source: /note="Description of Artificial Sequence: Synthetic peptide"
  MOD_RES (8)..(8): Citrulline
GLQEVLGXGALVDEVG

SEQ ID NO: 5428 - protein, 16 aa, Artificial Sequence
  source: /note="Description of Artificial Sequence: Synthetic peptide"
  MOD_RES (4)..(4): Citrulline
VLGXGALVDEVGVEDV

SEQ ID NO: 5429 - protein, 16 aa, Artificial Sequence
  source: /note="Description of Artificial Sequence: Synthetic peptide"
  MOD_RES (12)..(12): Citrulline
PPQPLELEHPTXGKLG

SEQ ID NO: 5430 - protein, 16 aa, Artificial Sequence
  source: /note="Description of Artificial Sequence: Synthetic peptide"
  MOD_RES (8)..(8): Citrulline
LELEHPTXGKLGSSPD

SEQ ID NO: 5431 - protein, 16 aa, Artificial Sequence
  source: /note="Description of Artificial Sequence: Synthetic peptide"
  MOD_RES (4)..(4): Citrulline
HPTXGKLGSSPDNPSS

SEQ ID NO: 5432 - protein, 16 aa, Artificial Sequence
  source: /note="Description of Artificial Sequence: Synthetic peptide"
  MOD_RES (12)..(12): Citrulline
LNSFGGCLEGSXGSTW

SEQ ID NO: 5433 - protein, 16 aa, Artificial Sequence
  source: /note="Description of Artificial Sequence: Synthetic peptide"
  MOD_RES (8)..(8): Citrulline
GGCLEGSXGSTWGSGG

SEQ ID NO: 5434 - protein, 16 aa, Artificial Sequence
  source: /note="Description of Artificial Sequence: Synthetic peptide"
  MOD_RES (4)..(4): Citrulline
  MOD_RES (13)..(13): Citrulline
EGSXGSTWGSGGXLGV

SEQ ID NO: 5435 - protein, 16 aa, Artificial Sequence
  source: /note="Description of Artificial Sequence: Synthetic peptide"
  MOD_RES (9)..(9): Citrulline
  MOD_RES (12)..(12): Citrulline
AEMAPYMKXLSXGQTV

SEQ ID NO: 5436 - protein, 16 aa, Artificial Sequence
  source: /note="Description of Artificial Sequence: Synthetic peptide"
  MOD_RES (5)..(5): Citrulline
  MOD_RES (8)..(8): Citrulline
PYMKXLSXGQTVEDLL

SEQ ID NO: 5437 - protein, 16 aa, Artificial Sequence
  source: /note="Description of Artificial Sequence: Synthetic peptide"
  MOD_RES (11)..(11): Citrulline
  MOD_RES (14)..(14): Citrulline
HAAICSQLLQXGAXVN

SEQ ID NO: 5438 - protein, 16 aa, Artificial Sequence
  source: /note="Description of Artificial Sequence: Synthetic peptide"
  MOD_RES (7)..(7): Citrulline
  MOD_RES (10)..(10): Citrulline
CSQLLQXGAXVNVTDK

SEQ ID NO: 5439 - protein, 16 aa, Artificial Sequence
  source: /note="Description of Artificial Sequence: Synthetic peptide"
  MOD_RES (1)..(1): Citrulline
  MOD_RES (10)..(10): Citrulline
XLQEENQQLXGSLSPC

SEQ ID NO: 5440 - protein, 16 aa, Artificial Sequence
  source: /note="Description of Artificial Sequence: Synthetic peptide"
  MOD_RES (6)..(6): Citrulline
  MOD_RES (13)..(13): Citrulline
ENQQLXGSLSPCXEPG

SEQ ID NO: 5441 - protein, 16 aa, Artificial Sequence
  source: /note="Description of Artificial Sequence: Synthetic peptide"
  MOD_RES (5)..(5): Citrulline
  MOD_RES (11)..(11): Citrulline
AASLXQHEKTXGSLVA

SEQ ID NO: 5442 - protein, 16 aa, Artificial Sequence
  source: /note="Description of Artificial Sequence: Synthetic peptide"
  MOD_RES (1)..(1): Citrulline
  MOD_RES (7)..(7): Citrulline
XQHEKTXGSLVAQAQA

SEQ ID NO: 5443 - protein, 16 aa, Artificial Sequence
  source: /note="Description of Artificial Sequence: Synthetic peptide"
  MOD_RES (3)..(3): Citrulline
KTXGSLVAQAQAWGQE

SEQ ID NO: 5444 - protein, 16 aa, Artificial Sequence
  source: /note="Description of Artificial Sequence: Synthetic peptide"
  MOD_RES (11)..(11): Citrulline
YLANKKYTQGXGSHSQ

SEQ ID NO: 5445 - protein, 16 aa, Artificial Sequence
  source: /note="Description of Artificial Sequence: Synthetic peptide"
  MOD_RES (7)..(7): Citrulline
  MOD_RES (15)..(15): Citrulline
KKYTQGXGSHSQEMXY

SEQ ID NO: 5446 - protein, 16 aa, Artificial Sequence
  source: /note="Description of Artificial Sequence: Synthetic peptide"
  MOD_RES (8)..(8): Citrulline
NSFFQLQXGEALSNSV

SEQ ID NO: 5447 - protein, 16 aa, Artificial Sequence
  source: /note="Description of Artificial Sequence: Synthetic peptide"
  MOD_RES (4)..(4): Citrulline
QLQXGEALSNSVYKGA

SEQ ID NO: 5448 - protein, 16 aa, Artificial Sequence
  source: /note="Description of Artificial Sequence: Synthetic peptide"
  MOD_RES (8)..(8): Citrulline
  MOD_RES (11)..(11): Citrulline
SPDVLSGXPYXGKPSD

SEQ ID NO: 5449 - protein, 16 aa, Artificial Sequence
  source: /note="Description of Artificial Sequence: Synthetic peptide"
  MOD_RES (12)..(12): Citrulline
DECTQSPGLCGXGACK

SEQ ID NO: 5450 - protein, 16 aa, Artificial Sequence
  source: /note="Description of Artificial Sequence: Synthetic peptide"
  MOD_RES (8)..(8): Citrulline
QSPGLCGXGACKNLPG

SEQ ID NO: 5451 - protein, 16 aa, Artificial Sequence
  source: /note="Description of Artificial Sequence: Synthetic peptide"
  MOD_RES (2)..(2): Citrulline
  MOD_RES (11)..(11): Citrulline
LXLPSESLQSXGQVMK

SEQ ID NO: 5452 - protein, 16 aa, Artificial Sequence
  source: /note="Description of Artificial Sequence: Synthetic peptide"
  MOD_RES (7)..(7): Citrulline
  MOD_RES (13)..(13): Citrulline
SESLQSXGQVMKXPNN

SEQ ID NO: 5453 - protein, 16 aa, Artificial Sequence
  source: /note="Description of Artificial Sequence: Synthetic peptide"
  MOD_RES (3)..(3): Citrulline
  MOD_RES (9)..(9): Citrulline
QSXGQVMKXPNNILKL

SEQ ID NO: 5454 - protein, 16 aa, Artificial Sequence
  source: /note="Description of Artificial Sequence: Synthetic peptide"
  MOD_RES (4)..(4): Citrulline
  MOD_RES (10)..(10): Citrulline
KKEXGTFDYXIDGKGN

SEQ ID NO: 5455 - protein, 16 aa, Artificial Sequence
  source: /note="Description of Artificial Sequence: Synthetic peptide"
  MOD_RES (4)..(4): Citrulline
  MOD_RES (7)..(7): Citrulline
KMGXFEXGLSSFQQSV

SEQ ID NO: 5456 - protein, 16 aa, Artificial Sequence
  source: /note="Description of Artificial Sequence: Synthetic peptide"
  MOD_RES (10)..(10): Citrulline
TVVYSKGLQXGSPAGA

SEQ ID NO: 5457 - protein, 16 aa, Artificial Sequence
  source: /note="Description of Artificial Sequence: Synthetic peptide"
  MOD_RES (6)..(6): Citrulline
SKGLQXGSPAGAWDSD

SEQ ID NO: 5458 - protein, 16 aa, Artificial Sequence
  source: /note="Description of Artificial Sequence: Synthetic peptide"
  MOD_RES (2)..(2): Citrulline
QXGSPAGAWDSDQNGN

SEQ ID NO: 5459 - protein, 16 aa, Artificial Sequence
  source: /note="Description of Artificial Sequence: Synthetic peptide"
  MOD_RES (9)..(9): Citrulline
HELPVPKPXGTPKPSE

SEQ ID NO: 5460 - protein, 16 aa, Artificial Sequence
  source: /note="Description of Artificial Sequence: Synthetic peptide"
  MOD_RES (5)..(5): Citrulline
VPKPXGTPKPSEGTPA

SEQ ID NO: 5461 - protein, 16 aa, Artificial Sequence
  source: /note="Description of Artificial Sequence: Synthetic peptide"
  MOD_RES (8)..(8): Citrulline
  MOD_RES (10)..(10): Citrulline
ASPGLAPXTXGSSGPQ

SEQ ID NO: 5462 - protein, 16 aa, Artificial Sequence
  source: /note="Description of Artificial Sequence: Synthetic peptide"
  MOD_RES (4)..(4): Citrulline
  MOD_RES (6)..(6): Citrulline
LAPXTXGSSGPQPAKP

SEQ ID NO: 5463 - protein, 16 aa, Artificial Sequence
  source: /note="Description of Artificial Sequence: Synthetic peptide"
  MOD_RES (2)..(2): Citrulline
TXGSSGPQPAKPCSGA

SEQ ID NO: 5464 - protein, 16 aa, Artificial Sequence
  source: /note="Description of Artificial Sequence: Synthetic peptide"
  MOD_RES (9)..(9): Citrulline
ALQPLQAAXGTIQSSP

SEQ ID NO: 5465 - protein, 16 aa, Artificial Sequence
  source: /note="Description of Artificial Sequence: Synthetic peptide"
  MOD_RES (5)..(5): Citrulline
  MOD_RES (15)..(15): Citrulline
LQAAXGTIQSSPQNXF

SEQ ID NO: 5466 - protein, 16 aa, Artificial Sequence
  source: /note="Description of Artificial Sequence: Synthetic peptide"
  MOD_RES (6)..(6): Citrulline
TADEPXGTLVKSGDGQ

SEQ ID NO: 5467 - protein, 16 aa, Artificial Sequence
  source: /note="Description of Artificial Sequence: Synthetic peptide"
  MOD_RES (2)..(2): Citrulline
PXGTLVKSGDGQNVKE

SEQ ID NO: 5468 - protein, 16 aa, Artificial Sequence
  source: /note="Description of Artificial Sequence: Synthetic peptide"
  MOD_RES (4)..(4): Citrulline
  MOD_RES (9)..(9): Citrulline
CNLXASVTXGLNPKQD

SEQ ID NO: 5469 - protein, 16 aa, Artificial Sequence
  source: /note="Description of Artificial Sequence: Synthetic peptide"
  MOD_RES (5)..(5): Citrulline
ASVTXGLNPKQDYCSI

SEQ ID NO: 5470 - protein, 16 aa, Artificial Sequence
  source: /note="Description of Artificial Sequence: Synthetic peptide"
  MOD_RES (7)..(7): Citrulline
IDVDLVXGSAFAKAKP

SEQ ID NO: 5471 - protein, 16 aa, Artificial Sequence
  source: /note="Description of Artificial Sequence: Synthetic peptide"
  MOD_RES (3)..(3): Citrulline
LVXGSAFAKAKPESPW

SEQ ID NO: 5472 - protein, 16 aa, Artificial Sequence
  source: /note="Description of Artificial Sequence: Synthetic peptide"
  MOD_RES (10)..(10): Citrulline
QYYPSKDLQXGVLDWK

SEQ ID NO: 5473 - protein, 16 aa, Artificial Sequence
  source: /note="Description of Artificial Sequence: Synthetic peptide"
  MOD_RES (9)..(9): Citrulline
  MOD_RES (14)..(14): Citrulline
AECHPPVGXGTGKXVL

SEQ ID NO: 5474 - protein, 16 aa, Artificial Sequence
  source: /note="Description of Artificial Sequence: Synthetic peptide"
  MOD_RES (13)..(14): Citrulline
QTEHHQTPLDYNXXGT

SEQ ID NO: 5475 - protein, 16 aa, Artificial Sequence
  source: /note="Description of Artificial Sequence: Synthetic peptide"
  MOD_RES (9)..(10): Citrulline
HQTPLDYNXXGTSLME

SEQ ID NO: 5476 - protein, 16 aa, Artificial Sequence
  source: /note="Description of Artificial Sequence: Synthetic peptide"
  MOD_RES (5)..(6): Citrulline
LDYNXXGTSLMEDDEE

SEQ ID NO: 5477 - protein, 16 aa, Artificial Sequence
  source: /note="Description of Artificial Sequence: Synthetic peptide"
  MOD_RES (1)..(2): Citrulline
XXGTSLMEDDEEPIVE

SEQ ID NO: 5478 - protein, 16 aa, Artificial Sequence
  source: /note="Description of Artificial Sequence: Synthetic peptide"
  MOD_RES (10)..(10): Citrulline
PAAGMGHQAXGMSLQS

SEQ ID NO: 5479 - protein, 16 aa, Artificial Sequence
  source: /note="Description of Artificial Sequence: Synthetic peptide"
  MOD_RES (6)..(6): Citrulline
MGHQAXGMSLQSNYLG

SEQ ID NO: 5480 - protein, 16 aa, Artificial Sequence
  source: /note="Description of Artificial Sequence: Synthetic peptide"
  MOD_RES (2)..(2): Citrulline
AXGMSLQSNYLGLAAA

SEQ ID NO: 5481 - protein, 16 aa, Artificial Sequence
  source: /note="Description of Artificial Sequence: Synthetic peptide"
  MOD_RES (13)..(13): Citrulline
LSMLTNPATPPAXGQY

SEQ ID NO: 5482 - protein, 16 aa, Artificial Sequence
  source: /note="Description of Artificial Sequence: Synthetic peptide"
  MOD_RES (9)..(9): Citrulline
TNPATPPAXGQYQIKM

SEQ ID NO: 5483 - protein, 16 aa, Artificial Sequence
  source: /note="Description of Artificial Sequence: Synthetic peptide"
  MOD_RES (14)..(14): Citrulline
EEHPQCLNSQPHAXGS

SEQ ID NO: 5484 - protein, 16 aa, Artificial Sequence
  source: /note="Description of Artificial Sequence: Synthetic peptide"
  MOD_RES (10)..(10): Citrulline
  MOD_RES (14)..(14): Citrulline
QCLNSQPHAXGSSXAI

SEQ ID NO: 5485 - protein, 16 aa, Artificial Sequence
  source: /note="Description of Artificial Sequence: Synthetic peptide"
  MOD_RES (2)..(2): Citrulline
  MOD_RES (12)..(12): Citrulline
GXQPCKCKACGXGFTQ

SEQ ID NO: 5486 - protein, 16 aa, Artificial Sequence
  source: /note="Description of Artificial Sequence: Synthetic peptide"
  MOD_RES (8)..(8): Citrulline
CKCKACGXGFTQSASL

SEQ ID NO: 5487 - protein, 16 aa, Artificial Sequence
  source: /note="Description of Artificial Sequence: Synthetic peptide"
  MOD_RES (11)..(11): Citrulline
ESLGMTVAGGXGSKSG

SEQ ID NO: 5488 - protein, 16 aa, Artificial Sequence
  source: /note="Description of Artificial Sequence: Synthetic peptide"
  MOD_RES (7)..(7): Citrulline
MTVAGGXGSKSGELPI

SEQ ID NO: 5489 - protein, 16 aa, Artificial Sequence
  source: /note="Description of Artificial Sequence: Synthetic peptide"
  MOD_RES (3)..(3): Citrulline
GGXGSKSGELPIFVTS

SEQ ID NO: 5490 - protein, 16 aa, Artificial Sequence
  source: /note="Description of Artificial Sequence: Synthetic peptide"
  MOD_RES (1)..(1): Citrulline
  MOD_RES (8)..(8): Citrulline
XVQYITIXGEIQEAFD

SEQ ID NO: 5491 - protein, 16 aa, Artificial Sequence
  source: /note="Description of Artificial Sequence: Synthetic peptide"
  MOD_RES (4)..(4): Citrulline
ITIXGEIQEAFDIYTN

SEQ ID NO: 5492 - protein, 16 aa, Artificial Sequence
  source: /note="Description of Artificial Sequence: Synthetic peptide"
  MOD_RES (13)..(13): Citrulline
PAIPAPTATPSAXGAV

SEQ ID NO: 5493 - protein, 16 aa, Artificial Sequence
  source: /note="Description of Artificial Sequence: Synthetic peptide"
  MOD_RES (9)..(9): Citrulline
  MOD_RES (14)..(14): Citrulline
APTATPSAXGAVIXQN

SEQ ID NO: 5494 - protein, 16 aa, Artificial Sequence
  source: /note="Description of Artificial Sequence: Synthetic peptide"
  MOD_RES (5)..(5): Citrulline
  MOD_RES (10)..(10): Citrulline
TPSAXGAVIXQNSDPT

SEQ ID NO: 5495 - protein, 16 aa, Artificial Sequence
  source: /note="Description of Artificial Sequence: Synthetic peptide"
  MOD_RES (12)..(12): Citrulline
PSKDGSGDYQSXGLVK

SEQ ID NO: 5496 - protein, 16 aa, Artificial Sequence
  source: /note="Description of Artificial Sequence: Synthetic peptide"
  MOD_RES (8)..(8): Citrulline
GSGDYQSXGLVKAPGK

SEQ ID NO: 5497 - protein, 16 aa, Artificial Sequence
  source: /note="Description of Artificial Sequence: Synthetic peptide"
  MOD_RES (4)..(4): Citrulline
YQSXGLVKAPGKSSFT

SEQ ID NO: 5498 - protein, 16 aa, Artificial Sequence
  source: /note="Description of Artificial Sequence: Synthetic peptide"
  MOD_RES (10)..(10): Citrulline
GFVKSHMKSXGDTLAF

SEQ ID NO: 5499 - protein, 16 aa, Artificial Sequence
  source: /note="Description of Artificial Sequence: Synthetic peptide"
  MOD_RES (6)..(6): Citrulline
SHMKSXGDTLAFFKQN

SEQ ID NO: 5500 - protein, 12 aa, Artificial Sequence
  source: /note="Description of Artificial Sequence: Synthetic peptide"
  MOD_RES (2)..(2): Citrulline
SXGDTLAFFKQN

SEQ ID NO: 5501 - protein, 16 aa, Artificial Sequence
  source: /note="Description of Artificial Sequence: Synthetic peptide"
  MOD_RES (2)..(2): Citrulline
  MOD_RES (9)..(9): Citrulline
DXEADKWSXGVDLPKA

SEQ ID NO: 5502 - protein, 16 aa, Artificial Sequence
  source: /note="Description of Artificial Sequence: Synthetic peptide"
  MOD_RES (6)..(6): Citrulline
  MOD_RES (13)..(13): Citrulline
KEIYIXGWKVEEXILG

SEQ ID NO: 5503 - protein, 16 aa, Artificial Sequence
  source: /note="Description of Artificial Sequence: Synthetic peptide"
  MOD_RES (9)..(9): Citrulline
  MOD_RES (12)..(12): Citrulline
PALCSLNLXGTXVTPS

SEQ ID NO: 5504 - protein, 16 aa, Artificial Sequence
  source: /note="Description of Artificial Sequence: Synthetic peptide"
  MOD_RES (5)..(5): Citrulline
  MOD_RES (8)..(8): Citrulline
SLNLXGTXVTPSTVSS

SEQ ID NO: 5505 - protein, 16 aa, Artificial Sequence
  source: /note="Description of Artificial Sequence: Synthetic peptide"
  MOD_RES (9)..(9): Citrulline
  MOD_RES (15)..(15): Citrulline
HGHVEWSSXGPPNKXF

SEQ ID NO: 5506 - protein, 16 aa, Artificial Sequence
  source: /note="Description of Artificial Sequence: Synthetic peptide"
  MOD_RES (5)..(5): Citrulline
  MOD_RES (11)..(11): Citrulline
EWSSXGPPNKXFYEKA

SEQ ID NO: 5507 - protein, 16 aa, Artificial Sequence
  source: /note="Description of Artificial Sequence: Synthetic peptide"
  MOD_RES (13)..(13): Citrulline
SSSSSPTSPGSFXGLK

SEQ ID NO: 5508 - protein, 16 aa, Artificial Sequence
  source: /note="Description of Artificial Sequence: Synthetic peptide"
  MOD_RES (9)..(9): Citrulline
SPTSPGSFXGLKQISA

SEQ ID NO: 5509 - protein, 16 aa, Artificial Sequence
  source: /note="Description of Artificial Sequence: Synthetic peptide"
  MOD_RES (10)..(10): Citrulline
EPIHAVVLPXGKSLDQ

SEQ ID NO: 5510 - protein, 16 aa, Artificial Sequence
  source: /note="Description of Artificial Sequence: Synthetic peptide"
  MOD_RES (6)..(6): Citrulline
AVVLPXGKSLDQCVET

SEQ ID NO: 5511 - protein, 16 aa, Artificial Sequence
  source: /note="Description of Artificial Sequence: Synthetic peptide"
  MOD_RES (11)..(11): Citrulline
  MOD_RES (14)..(14): Citrulline
GHYCQLQPPVXGSXEW

SEQ ID NO: 5512 - protein, 16 aa, Artificial Sequence
  source: /note="Description of Artificial Sequence: Synthetic peptide"
  MOD_RES (7)..(7): Citrulline
  MOD_RES (10)..(10): Citrulline
QLQPPVXGSXEWAATE

SEQ ID NO: 5513 - protein, 16 aa, Artificial Sequence
  source: /note="Description of Artificial Sequence: Synthetic peptide"
  MOD_RES (12)..(12): Citrulline
  MOD_RES (14)..(14): Citrulline
ACLSTPYSSIPXGXEK

SEQ ID NO: 5514 - protein, 16 aa, Artificial Sequence
  source: /note="Description of Artificial Sequence: Synthetic peptide"
  MOD_RES (8)..(8): Citrulline
  MOD_RES (10)..(10): Citrulline
TPYSSIPXGXEKAGPM

SEQ ID NO: 5515 - protein, 16 aa, Artificial Sequence
  source: /note="Description of Artificial Sequence: Synthetic peptide"
  MOD_RES (13)..(13): Citrulline
TEYQMALSPPASXGKL

SEQ ID NO: 5516 - protein, 16 aa, Artificial Sequence
  source: /note="Description of Artificial Sequence: Synthetic peptide"
  MOD_RES (9)..(9): Citrulline
MALSPPASXGKLPGDF

SEQ ID NO: 5517 - protein, 16 aa, Artificial Sequence
  source: /note="Description of Artificial Sequence: Synthetic peptide"
  MOD_RES (5)..(5): Citrulline
PPASXGKLPGDFDVLP

SEQ ID NO: 5518 - protein, 16 aa, Artificial Sequence
  source: /note="Description of Artificial Sequence: Synthetic peptide"
  MOD_RES (10)..(10): Citrulline
SASPPKSYIXGKLGLE

SEQ ID NO: 5519 - protein, 16 aa, Artificial Sequence
  source: /note="Description of Artificial Sequence: Synthetic peptide"
  MOD_RES (6)..(6): Citrulline
PKSYIXGKLGLEEYAV

SEQ ID NO: 5520 - protein, 16 aa, Artificial Sequence
  source: /note="Description of Artificial Sequence: Synthetic peptide"
  MOD_RES (1)..(1): Citrulline
  MOD_RES (9)..(9): Citrulline
XPFPASYAXGDCKDFE

SEQ ID NO: 5521 - protein, 16 aa, Artificial Sequence
  source: /note="Description of Artificial Sequence: Synthetic peptide"
  MOD_RES (8)..(8): Citrulline
  MOD_RES (10)..(10): Citrulline
LSTESSPXGXQLYSAS

SEQ ID NO: 5522 - protein, 16 aa, Artificial Sequence
  source: /note="Description of Artificial Sequence: Synthetic peptide"
  MOD_RES (4)..(4): Citrulline
  MOD_RES (6)..(6): Citrulline
SSPXGXQLYSASTEGL

SEQ ID NO: 5523 - protein, 16 aa, Artificial Sequence
  source: /note="Description of Artificial Sequence: Synthetic peptide"
  MOD_RES (7)..(7): Citrulline
KKYLIAXGKLDWAEGP

SEQ ID NO: 5524 - protein, 16 aa, Artificial Sequence
  source: /note="Description of Artificial Sequence: Synthetic peptide"
  MOD_RES (3)..(3): Citrulline
IAXGKLDWAEGPAAGP

SEQ ID NO: 5525 - protein, 16 aa, Artificial Sequence
  source: /note="Description of Artificial Sequence: Synthetic peptide"
  MOD_RES (11)..(12): Citrulline
SQEQTSKVLIXXGSME

SEQ ID NO: 5526 - protein, 16 aa, Artificial Sequence
  source: /note="Description of Artificial Sequence: Synthetic peptide"
  MOD_RES (7)..(8): Citrulline
TSKVLIXXGSMEVKAN

SEQ ID NO: 5527 - protein, 16 aa, Artificial Sequence
  source: /note="Description of Artificial Sequence: Synthetic peptide"
  MOD_RES (3)..(4): Citrulline
LIXXGSMEVKANDFHS

SEQ ID NO: 5528 - protein, 16 aa, Artificial Sequence
  source: /note="Description of Artificial Sequence: Synthetic peptide"
  MOD_RES (11)..(11): Citrulline
KPVISASPTIXGQELQ

SEQ ID NO: 5529 - protein, 16 aa, Artificial Sequence
  source: /note="Description of Artificial Sequence: Synthetic peptide"
  MOD_RES (7)..(7): Citrulline
  MOD_RES (14)..(14): Citrulline
SASPTIXGQELQLXCK

SEQ ID NO: 5530 - protein, 16 aa, Artificial Sequence
  source: /note="Description of Artificial Sequence: Synthetic peptide"
  MOD_RES (6)..(6): Citrulline
  MOD_RES (9)..(9): Citrulline
DGSTCXLVXGQYKSQL

SEQ ID NO: 5531 - protein, 16 aa, Artificial Sequence
  source: /note="Description of Artificial Sequence: Synthetic peptide"
  MOD_RES (2)..(2): Citrulline
  MOD_RES (5)..(5): Citrulline
CXLVXGQYKSQLSATK

SEQ ID NO: 5532 - protein, 16 aa, Artificial Sequence
  source: /note="Description of Artificial Sequence: Synthetic peptide"
  MOD_RES (9)..(9): Citrulline
  MOD_RES (11)..(11): Citrulline
HTEVPDAYXGXGIAKH

SEQ ID NO: 5533 - protein, 16 aa, Artificial Sequence
  source: /note="Description of Artificial Sequence: Synthetic peptide"
  MOD_RES (5)..(5): Citrulline
  MOD_RES (7)..(7): Citrulline
PDAYXGXGIAKHLAKA

SEQ ID NO: 5534 - protein, 16 aa, Artificial Sequence
  source: /note="Description of Artificial Sequence: Synthetic peptide"
  MOD_RES (9)..(9): Citrulline
MEAQMEQLXGSIEKLK

SEQ ID NO: 5535 - protein, 16 aa, Artificial Sequence
  source: /note="Description of Artificial Sequence: Synthetic peptide"
  MOD_RES (5)..(5): Citrulline
  MOD_RES (16)..(16): Citrulline
MEQLXGSIEKLKCFNX

SEQ ID NO: 5536 - protein, 16 aa, Artificial Sequence
  source: /note="Description of Artificial Sequence: Synthetic peptide"
  MOD_RES (10)..(10): Citrulline
EMLNLWQKIXGDLIGM

SEQ ID NO: 5537 - protein, 16 aa, Artificial Sequence
  source: /note="Description of Artificial Sequence: Synthetic peptide"
  MOD_RES (6)..(6): Citrulline
  MOD_RES (15)..(15): Citrulline
LWQKIXGDLIGMDSXN

SEQ ID NO: 5538 - protein, 16 aa, Artificial Sequence
  source: /note="Description of Artificial Sequence: Synthetic peptide"
  MOD_RES (6)..(6): Citrulline
QHLLFXGQLLEDDKHL

SEQ ID NO: 5539 - protein, 16 aa, Artificial Sequence
  source: /note="Description of Artificial Sequence: Synthetic peptide"
  MOD_RES (2)..(2): Citrulline
FXGQLLEDDKHLSDYC

SEQ ID NO: 5540 - protein, 16 aa, Artificial Sequence
  source: /note="Description of Artificial Sequence: Synthetic peptide"
  MOD_RES (2)..(2): Citrulline
  MOD_RES (10)..(10): Citrulline
GXAAHSWKKXGSISSL

SEQ ID NO: 5541 - protein, 16 aa, Artificial Sequence
  source: /note="Description of Artificial Sequence: Synthetic peptide"
  MOD_RES (6)..(6): Citrulline
HSWKKXGSISSLSNHE

SEQ ID NO: 5542 - protein, 16 aa, Artificial Sequence
  source: /note="Description of Artificial Sequence: Synthetic peptide"
  MOD_RES (2)..(2): Citrulline
  MOD_RES (8)..(8): Citrulline
SXVLEQLXGNVLLNGL

SEQ ID NO: 5543 - protein, 16 aa, Artificial Sequence
  source: /note="Description of Artificial Sequence: Synthetic peptide"
  MOD_RES (4)..(4): Citrulline
EQLXGNVLLNGLSLEA

SEQ ID NO: 5544 - protein, 16 aa, Artificial Sequence
  source: /note="Description of Artificial Sequence: Synthetic peptide"
  MOD_RES (5)..(5): Citrulline
  MOD_RES (10)..(10): Citrulline
QNISXTVMQXGSLGVD

SEQ ID NO: 5545 - protein, 16 aa, Artificial Sequence
  source: /note="Description of Artificial Sequence: Synthetic peptide"
  MOD_RES (1)..(1): Citrulline
  MOD_RES (6)..(6): Citrulline
XTVMQXGSLGVDSVSA

SEQ ID NO: 5546 - protein, 16 aa, Artificial Sequence
  source: /note="Description of Artificial Sequence: Synthetic peptide"
  MOD_RES (12)..(12): Citrulline
  MOD_RES (14)..(14): Citrulline
HSGDHYTEAYSXGXDS

SEQ ID NO: 5547 - protein, 16 aa, Artificial Sequence
  source: /note="Description of Artificial Sequence: Synthetic peptide"
  MOD_RES (8)..(8): Citrulline
  MOD_RES (10)..(10): Citrulline
HYTEAYSXGXDSFSNS

SEQ ID NO: 5548 - protein, 16 aa, Artificial Sequence
  source: /note="Description of Artificial Sequence: Synthetic peptide"
  MOD_RES (3)..(3): Citrulline
  MOD_RES (12)..(12): Citrulline
QGXSPNAYGGGXGLNS

SEQ ID NO: 5549 - protein, 16 aa, Artificial Sequence
  source: /note="Description of Artificial Sequence: Synthetic peptide"
  MOD_RES (9)..(9): Citrulline
  MOD_RES (12)..(12): Citrulline
GSPNPWPSXLPXGGLQ

SEQ ID NO: 5550 - protein, 16 aa, Artificial Sequence
  source: /note="Description of Artificial Sequence: Synthetic peptide"
  MOD_RES (5)..(5): Citrulline
  MOD_RES (8)..(8): Citrulline
PWPSXLPXGGLQLTLP

SEQ ID NO: 5551 - protein, 16 aa, Artificial Sequence
  source: /note="Description of Artificial Sequence: Synthetic peptide"
  MOD_RES (13)..(13): Citrulline
LGPATEWNHGLPXGFP

SEQ ID NO: 5552 - protein, 16 aa, Artificial Sequence
  source: /note="Description of Artificial Sequence: Synthetic peptide"
  MOD_RES (9)..(9): Citrulline
  MOD_RES (13)..(13): Citrulline
TEWNHGLPXGFPXPPL

SEQ ID NO: 5553 - protein, 16 aa, Artificial Sequence
  source: /note="Description of Artificial Sequence: Synthetic peptide"
  MOD_RES (5)..(5): Citrulline
  MOD_RES (9)..(9): Citrulline
HGLPXGFPXPPLGLGA

SEQ ID NO: 5554 - protein, 16 aa, Artificial Sequence
  source: /note="Description of Artificial Sequence: Synthetic peptide"
  MOD_RES (13)..(13): Citrulline
  MOD_RES (16)..(16): Citrulline
ICDQDLSNYDPKXGNX

SEQ ID NO: 5555 - protein, 16 aa, Artificial Sequence
  source: /note="Description of Artificial Sequence: Synthetic peptide"
  MOD_RES (9)..(9): Citrulline
  MOD_RES (12)..(12): Citrulline
DLSNYDPKXGNXKTSS

SEQ ID NO: 5556 - protein, 16 aa, Artificial Sequence
  source: /note="Description of Artificial Sequence: Synthetic peptide"
  MOD_RES (5)..(5): Citrulline
  MOD_RES (8)..(8): Citrulline
YDPKXGNXKTSSQQSP

SEQ ID NO: 5557 - protein, 16 aa, Artificial Sequence
  source: /note="Description of Artificial Sequence: Synthetic peptide"
  MOD_RES (1)..(1): Citrulline
  MOD_RES (4)..(4): Citrulline
XGNXKTSSQQSPTGAS

SEQ ID NO: 5558 - protein, 16 aa, Artificial Sequence
  source: /note="Description of Artificial Sequence: Synthetic peptide"
  MOD_RES (14)..(14): Citrulline
VPTKAYDSTVLKTXGN

SEQ ID NO: 5559 - protein, 16 aa, Artificial Sequence
  source: /note="Description of Artificial Sequence: Synthetic peptide"
  MOD_RES (10)..(10): Citrulline
  MOD_RES (15)..(15): Citrulline
AYDSTVLKTXGNPYXY

SEQ ID NO: 5560 - protein, 16 aa, Artificial Sequence
  source: /note="Description of Artificial Sequence: Synthetic peptide"
  MOD_RES (6)..(6): Citrulline
  MOD_RES (11)..(11): Citrulline
TVLKTXGNPYXYELID

SEQ ID NO: 5561 - protein, 16 aa, Artificial Sequence
  source: /note="Description of Artificial Sequence: Synthetic peptide"
  MOD_RES (11)..(11): Citrulline
PGQGVYYDFPXGVEKN

SEQ ID NO: 5562 - protein, 16 aa, Artificial Sequence
  source: /note="Description of Artificial Sequence: Synthetic peptide"
  MOD_RES (7)..(7): Citrulline
VYYDFPXGVEKNKPVF

SEQ ID NO: 5563 - protein, 16 aa, Artificial Sequence
  source: /note="Description of Artificial Sequence: Synthetic peptide"
  MOD_RES (6)..(6): Citrulline
  MOD_RES (8)..(8): Citrulline
PCTQVXTXGQSAEAVH

SEQ ID NO: 5564 - protein, 16 aa, Artificial Sequence
  source: /note="Description of Artificial Sequence: Synthetic peptide"
  MOD_RES (2)..(2): Citrulline
  MOD_RES (4)..(4): Citrulline
VXTXGQSAEAVHQIQE

SEQ ID NO: 5565 - protein, 16 aa, Artificial Sequence
  source: /note="Description of Artificial Sequence: Synthetic peptide"
  MOD_RES (4)..(4): Citrulline
  MOD_RES (15)..(15): Citrulline
TAGXGGGCSAALSPXG

SEQ ID NO: 5566 - protein, 16 aa, Artificial Sequence
  source: /note="Description of Artificial Sequence: Synthetic peptide"
  MOD_RES (11)..(11): Citrulline
  MOD_RES (13)..(13): Citrulline
GGGCSAALSPXGXGSK

SEQ ID NO: 5567 - protein, 16 aa, Artificial Sequence
  source: /note="Description of Artificial Sequence: Synthetic peptide"
  MOD_RES (7)..(7): Citrulline
  MOD_RES (9)..(9): Citrulline
SAALSPXGXGSKGLGT

SEQ ID NO: 5568 - protein, 16 aa, Artificial Sequence
  source: /note="Description of Artificial Sequence: Synthetic peptide"
  MOD_RES (7)..(7): Citrulline
  MOD_RES (9)..(9): Citrulline
SLCWAPXGXLLASSPA

SEQ ID NO: 5569 - protein, 16 aa, Artificial Sequence
  source: /note="Description of Artificial Sequence: Synthetic peptide"
  MOD_RES (3)..(3): Citrulline
  MOD_RES (5)..(5): Citrulline
APXGXLLASSPAGEAG

SEQ ID NO: 5570 - protein, 16 aa, Artificial Sequence
  source: /note="Description of Artificial Sequence: Synthetic peptide"
  MOD_RES (6)..(6): Citrulline
  MOD_RES (11)..(11): Citrulline
HKEKIXLLQTXGDSFP

SEQ ID NO: 5571 - protein, 16 aa, Artificial Sequence
  source: /note="Description of Artificial Sequence: Synthetic peptide"
  MOD_RES (2)..(2): Citrulline
  MOD_RES (7)..(7): Citrulline
IXLLQTXGDSFPLLGD

SEQ ID NO: 5572 - protein, 16 aa, Artificial Sequence
  source: /note="Description of Artificial Sequence: Synthetic peptide"
  MOD_RES (3)..(3): Citrulline
QTXGDSFPLLGDSGTV

SEQ ID NO: 5573 - protein, 16 aa, Artificial Sequence
  source: /note="Description of Artificial Sequence: Synthetic peptide"
  MOD_RES (9)..(9): Citrulline
LGQEPLCPXGAVLLNS

SEQ ID NO: 5574 - protein, 16 aa, Artificial Sequence
  source: /note="Description of Artificial Sequence: Synthetic peptide"
  MOD_RES (5)..(5): Citrulline
PLCPXGAVLLNSFSPP

SEQ ID NO: 5575 - protein, 16 aa, Artificial Sequence
  source: /note="Description of Artificial Sequence: Synthetic peptide"
  MOD_RES (6)..(6): Citrulline
QLSIEXGKVLQNKQAE

SEQ ID NO: 5576 - protein, 16 aa, Artificial Sequence
  source: /note="Description of Artificial Sequence: Synthetic peptide"
  MOD_RES (2)..(2): Citrulline
EXGKVLQNKQAEICQL

SEQ ID NO: 5577 - protein, 16 aa, Artificial Sequence
  source: /note="Description of Artificial Sequence: Synthetic peptide"
  MOD_RES (5)..(5): Citrulline
  MOD_RES (11)..(11): Citrulline
IPKQXLGLVKXGSYIE

SEQ ID NO: 5578 - protein, 16 aa, Artificial Sequence
  source: /note="Description of Artificial Sequence: Synthetic peptide"
  MOD_RES (10)..(10): Citrulline
ELEYPFQAGXGASLQQ

SEQ ID NO: 5579 - protein, 16 aa, Artificial Sequence
  source: /note="Description of Artificial Sequence: Synthetic peptide"
  MOD_RES (6)..(6): Citrulline
PFQAGXGASLQQELTE

SEQ ID NO: 5580 - protein, 16 aa, Artificial Sequence
  source: /note="Description of Artificial Sequence: Synthetic peptide"
  MOD_RES (2)..(2): Citrulline
GXGASLQQELTEPTLA

SEQ ID NO: 5581 - protein, 16 aa, Artificial Sequence
  source: /note="Description of Artificial Sequence: Synthetic peptide"
  MOD_RES (14)..(14): Citrulline
KLMECHECGKAFSXGS

SEQ ID NO: 5582 - protein, 16 aa, Artificial Sequence
  source: /note="Description of Artificial Sequence: Synthetic peptide"
  MOD_RES (10)..(10): Citrulline
CHECGKAFSXGSHLIQ

SEQ ID NO: 5583 - protein, 16 aa, Artificial Sequence
  source: /note="Description of Artificial Sequence: Synthetic peptide"
  MOD_RES (6)..(6): Citrulline
GKAFSXGSHLIQHQKI

SEQ ID NO: 5584 - protein, 16 aa, Artificial Sequence
  source: /note="Description of Artificial Sequence: Synthetic peptide"
  MOD_RES (2)..(2): Citrulline
SXGSHLIQHQKIHTGE

SEQ ID NO: 5585 - protein, 16 aa, Artificial Sequence
  source: /note="Description of Artificial Sequence: Synthetic peptide"
  MOD_RES (14)..(14): Citrulline
KPYVCKDCGKAFIXGS

SEQ ID NO: 5586 - protein, 16 aa, Artificial Sequence
  source: /note="Description of Artificial Sequence: Synthetic peptide"
  MOD_RES (10)..(10): Citrulline
CKDCGKAFIXGSQLTV

SEQ ID NO: 5587 - protein, 16 aa, Artificial Sequence
  source: /note="Description of Artificial Sequence: Synthetic peptide"
  MOD_RES (5)..(5): Citrulline
IWIKXGDFLIVDPIEE

SEQ ID NO: 5588 - protein, 16 aa, Artificial Sequence
  source: /note="Description of Artificial Sequence: Synthetic peptide"
  MOD_RES (12)..(12): Citrulline
KASLPESSYFLXGSQE

SEQ ID NO: 5589 - protein, 16 aa, Artificial Sequence
  source: /note="Description of Artificial Sequence: Synthetic peptide"
  MOD_RES (8)..(8): Citrulline
  MOD_RES (15)..(15): Citrulline
PESSYFLXGSQESCXQ

SEQ ID NO: 5590 - protein, 16 aa, Artificial Sequence
  source: /note="Description of Artificial Sequence: Synthetic peptide"
  MOD_RES (7)..(8): Citrulline
KSEELSXXGSEVISNT

SEQ ID NO: 5591 - protein, 16 aa, Artificial Sequence
  source: /note="Description of Artificial Sequence: Synthetic peptide"
  MOD_RES (3)..(4): Citrulline
LSXXGSEVISNTTEDT

SEQ ID NO: 5592 - protein, 16 aa, Artificial Sequence
  source: /note="Description of Artificial Sequence: Synthetic peptide"
  MOD_RES (5)..(5): Citrulline
  MOD_RES (7)..(7): Citrulline
SSEVXGXKITKNFSEV

SEQ ID NO: 5593 - protein, 16 aa, Artificial Sequence
  source: /note="Description of Artificial Sequence: Synthetic peptide"
  MOD_RES (1)..(1): Citrulline
  MOD_RES (3)..(3): Citrulline
XGXKITKNFSEVGFPD

SEQ ID NO: 5594 - protein, 16 aa, Artificial Sequence
  source: /note="Description of Artificial Sequence: Synthetic peptide"
  MOD_RES (14)..(14): Citrulline
DFPLLPQEEKAYIXGK

SEQ ID NO: 5595 - protein, 16 aa, Artificial Sequence
  source: /note="Description of Artificial Sequence: Synthetic peptide"
  MOD_RES (10)..(10): Citrulline
LPQEEKAYIXGKSYEY

SEQ ID NO: 5596 - protein, 16 aa, Artificial Sequence
  source: /note="Description of Artificial Sequence: Synthetic peptide"
  MOD_RES (11)..(11): Citrulline
LSLDFAGYQTXGCSQP

SEQ ID NO: 5597 - protein, 16 aa, Artificial Sequence
  source: /note="Description of Artificial Sequence: Synthetic peptide"
  MOD_RES (7)..(7): Citrulline
  MOD_RES (14)..(14): Citrulline
FAGYQTXGCSQPEXVK

SEQ ID NO: 5598 - protein, 16 aa, Artificial Sequence
  source: /note="Description of Artificial Sequence: Synthetic peptide"
  MOD_RES (6)..(6): Citrulline
  MOD_RES (9)..(9): Citrulline
HLHADXIGXGSKAEDE

SEQ ID NO: 5599 - protein, 16 aa, Artificial Sequence
  source: /note="Description of Artificial Sequence: Synthetic peptide"
  MOD_RES (2)..(2): Citrulline
  MOD_RES (5)..(5): Citrulline
DXIGXGSKAEDEDKSH

SEQ ID NO: 5600 - protein, 16 aa, Artificial Sequence
  source: /note="Description of Artificial Sequence: Synthetic peptide"
  MOD_RES (11)..(11): Citrulline
SLPVVQNDSSXGSSVS

SEQ ID NO: 5601 - protein, 16 aa, Artificial Sequence
  source: /note="Description of Artificial Sequence: Synthetic peptide"
  MOD_RES (7)..(7): Citrulline
VQNDSSXGSSVSSNLQ

SEQ ID NO: 5602 - protein, 16 aa, Artificial Sequence
  source: /note="Description of Artificial Sequence: Synthetic peptide"
  MOD_RES (3)..(3): Citrulline
SSXGSSVSSNLQEEYE

SEQ ID NO: 5603 - protein, 16 aa, Artificial Sequence
  source: /note="Description of Artificial Sequence: Synthetic peptide"
  MOD_RES (9)..(9): Citrulline
  MOD_RES (12)..(12): Citrulline
LFVIGGKTXGSXDIKS

SEQ ID NO: 5604 - protein, 16 aa, Artificial Sequence
  source: /note="Description of Artificial Sequence: Synthetic peptide"
  MOD_RES (5)..(5): Citrulline
  MOD_RES (8)..(8): Citrulline
GGKTXGSXDIKSLLDV

SEQ ID NO: 5605 - protein, 16 aa, Artificial Sequence
  source: /note="Description of Artificial Sequence: Synthetic peptide"
  MOD_RES (7)..(7): Citrulline
TAEGKGXGLKATKEFW

SEQ ID NO: 5606 - protein, 16 aa, Artificial Sequence
  source: /note="Description of Artificial Sequence: Synthetic peptide"
  MOD_RES (10)..(10): Citrulline
KSFKGVTVGXGAQIVN

SEQ ID NO: 5607 - protein, 16 aa, Artificial Sequence
  source: /note="Description of Artificial Sequence: Synthetic peptide"
  MOD_RES (6)..(6): Citrulline
GVTVGXGAQIVNGCIN

SEQ ID NO: 5608 - protein, 16 aa, Artificial Sequence
  source: /note="Description of Artificial Sequence: Synthetic peptide"
  MOD_RES (2)..(2): Citrulline
GXGAQIVNGCINNPVA

SEQ ID NO: 5609 - protein, 16 aa, Artificial Sequence
  source: /note="Description of Artificial Sequence: Synthetic peptide"
  MOD_RES (9)..(9): Citrulline
  MOD_RES (13)..(13): Citrulline
IALKYYKDXGQIXDNK

SEQ ID NO: 5610 - protein, 16 aa, Artificial Sequence
  source: /note="Description of Artificial Sequence: Synthetic peptide"
  MOD_RES (5)..(5): Citrulline
  MOD_RES (9)..(9): Citrulline
YYKDXGQIXDNKIGIK

SEQ ID NO: 5611 - protein, 16 aa, Artificial Sequence
  source: /note="Description of Artificial Sequence: Synthetic peptide"
  MOD_RES (11)..(11): Citrulline
QQANPSSLLQXGGGFQ

SEQ ID NO: 5612 - protein, 16 aa, Artificial Sequence
  source: /note="Description of Artificial Sequence: Synthetic peptide"
  MOD_RES (7)..(7): Citrulline
PSSLLQXGGGFQGVGN

SEQ ID NO: 5613 - protein, 16 aa, Artificial Sequence
  source: /note="Description of Artificial Sequence: Synthetic peptide"
  MOD_RES (10)..(10): Citrulline
TEEEWEFAAXGGLKGQ

SEQ ID NO: 5614 - protein, 16 aa, Artificial Sequence
  source: /note="Description of Artificial Sequence: Synthetic peptide"
  MOD_RES (6)..(6): Citrulline
WEFAAXGGLKGQVYPW

SEQ ID NO: 5615 - protein, 16 aa, Artificial Sequence
  source: /note="Description of Artificial Sequence: Synthetic peptide"
  MOD_RES (6)..(6): Citrulline
  MOD_RES (9)..(9): Citrulline
AEQDMXVLXGASWIDT

SEQ ID NO: 5616 - protein, 16 aa, Artificial Sequence
  source: /note="Description of Artificial Sequence: Synthetic peptide"
  MOD_RES (2)..(2): Citrulline
  MOD_RES (5)..(5): Citrulline
MXVLXGASWIDTADGS

SEQ ID NO: 5617 - protein, 16 aa, Artificial Sequence
  source: /note="Description of Artificial Sequence: Synthetic peptide"
  MOD_RES (9)..(9): Citrulline
  MOD_RES (14)..(14): Citrulline
IEEDLTPFXGGISXKM

SEQ ID NO: 5618 - protein, 16 aa, Artificial Sequence
  source: /note="Description of Artificial Sequence: Synthetic peptide"
  MOD_RES (5)..(5): Citrulline
  MOD_RES (10)..(10): Citrulline
LTPFXGGISXKMMAEV

SEQ ID NO: 5619 - protein, 16 aa, Artificial Sequence
  source: /note="Description of Artificial Sequence: Synthetic peptide"
  MOD_RES (8)..(8): Citrulline
  MOD_RES (16)..(16): Citrulline
LMEMGFSXGDALEALX

SEQ ID NO: 5620 - protein, 16 aa, Artificial Sequence
  source: /note="Description of Artificial Sequence: Synthetic peptide"
  MOD_RES (3)..(3): Citrulline
  MOD_RES (13)..(13): Citrulline
LSXGFNNHINLIXGQV

SEQ ID NO: 5621 - protein, 16 aa, Artificial Sequence
  source: /note="Description of Artificial Sequence: Synthetic peptide"
  MOD_RES (9)..(9): Citrulline
  MOD_RES (16)..(16): Citrulline
FNNHINLIXGQVINMX

SEQ ID NO: 5622 - protein, 16 aa, Artificial Sequence
  source: /note="Description of Artificial Sequence: Synthetic peptide"
  MOD_RES (7)..(7): Citrulline
AAEAPLXGQYKVTASP

SEQ ID NO: 5623 - protein, 16 aa, Artificial Sequence
  source: /note="Description of Artificial Sequence: Synthetic peptide"
  MOD_RES (3)..(3): Citrulline
PLXGQYKVTASPETAV

SEQ ID NO: 5624 - protein, 16 aa, Artificial Sequence
  source: /note="Description of Artificial Sequence: Synthetic peptide"
  MOD_RES (13)..(13): Citrulline
  MOD_RES (15)..(15): Citrulline
MLILLGKGFTVTXGXI

SEQ ID NO: 5625 - protein, 16 aa, Artificial Sequence
  source: /note="Description of Artificial Sequence: Synthetic peptide"
  MOD_RES (9)..(9): Citrulline
  MOD_RES (11)..(11): Citrulline
LGKGFTVTXGXISHAG

SEQ ID NO: 5626 - protein, 16 aa, Artificial Sequence
  source: /note="Description of Artificial Sequence: Synthetic peptide"
  MOD_RES (14)..(14): Citrulline
PDCPVGGPLTFPGXGS

SEQ ID NO: 5627 - protein, 16 aa, Artificial Sequence
  source: /note="Description of Artificial Sequence: Synthetic peptide"
  MOD_RES (10)..(10): Citrulline
VGGPLTFPGXGSGAGV

SEQ ID NO: 5628 - protein, 16 aa, Artificial Sequence
  source: /note="Description of Artificial Sequence: Synthetic peptide"
  MOD_RES (6)..(6): Citrulline
LTFPGXGSGAGVGTTL

SEQ ID NO: 5629 - protein, 16 aa, Artificial Sequence
  source: /note="Description of Artificial Sequence: Synthetic peptide"
  MOD_RES (9)..(9): Citrulline
FIGIGFTDXGDAFDFN

SEQ ID NO: 5630 - protein, 16 aa, Artificial Sequence
  source: /note="Description of Artificial Sequence: Synthetic peptide"
  MOD_RES (8)..(8): Citrulline
  MOD_RES (12)..(12): Citrulline
GGYDHGGXGGGXGNKH

SEQ ID NO: 5631 - protein, 16 aa, Artificial Sequence
  source: /note="Description of Artificial Sequence: Synthetic peptide"
  MOD_RES (4)..(4): Citrulline
  MOD_RES (8)..(8): Citrulline
HGGXGGGXGNKHQGGW

SEQ ID NO: 5632 - protein, 16 aa, Artificial Sequence
  source: /note="Description of Artificial Sequence: Synthetic peptide"
  MOD_RES (2)..(2): Citrulline
  MOD_RES (12)..(12): Citrulline
GXAGQGGGWGGXGSQN

SEQ ID NO: 5633 - protein, 16 aa, Artificial Sequence
  source: /note="Description of Artificial Sequence: Synthetic peptide"
  MOD_RES (8)..(8): Citrulline
QGGGWGGXGSQNYHQG

SEQ ID NO: 5634 - protein, 16 aa, Artificial Sequence
  source: /note="Description of Artificial Sequence: Synthetic peptide"
  MOD_RES (4)..(4): Citrulline
WGGXGSQNYHQGGQFE

SEQ ID NO: 5635 - protein, 16 aa, Artificial Sequence
  source: /note="Description of Artificial Sequence: Synthetic peptide"
  MOD_RES (10)..(10): Citrulline
  MOD_RES (15)..(15): Citrulline
IGGLLEQFAXGVGLXS

SEQ ID NO: 5636 - protein, 16 aa, Artificial Sequence
  source: /note="Description of Artificial Sequence: Synthetic peptide"
  MOD_RES (6)..(6): Citrulline
  MOD_RES (11)..(11): Citrulline
LEQFAXGVGLXSISSN

SEQ ID NO: 5637 - protein, 16 aa, Artificial Sequence
  source: /note="Description of Artificial Sequence: Synthetic peptide"
  MOD_RES (11)..(11): Citrulline
SVGLGTESTGXGKPHF

SEQ ID NO: 5638 - protein, 16 aa, Artificial Sequence
  source: /note="Description of Artificial Sequence: Synthetic peptide"
  MOD_RES (7)..(7): Citrulline
GTESTGXGKPHFTLEG

SEQ ID NO: 5639 - protein, 16 aa, Artificial Sequence
  source: /note="Description of Artificial Sequence: Synthetic peptide"
  MOD_RES (7)..(7): Citrulline
  MOD_RES (13)..(13): Citrulline
KDYPKNXHPGWSXGSV

SEQ ID NO: 5640 - protein, 16 aa, Artificial Sequence
  source: /note="Description of Artificial Sequence: Synthetic peptide"
  MOD_RES (6)..(6): Citrulline
  MOD_RES (10)..(10): Citrulline
LCSQKXFYSXGLNSLE

SEQ ID NO: 5641 - protein, 16 aa, Artificial Sequence
  source: /note="Description of Artificial Sequence: Synthetic peptide"
  MOD_RES (2)..(2): Citrulline
  MOD_RES (6)..(6): Citrulline
KXFYSXGLNSLESTLT

SEQ ID NO: 5642 - protein, 16 aa, Artificial Sequence
  source: /note="Description of Artificial Sequence: Synthetic peptide"
  MOD_RES (9)..(9): Citrulline
VIPILKYVXGEHLSPD

SEQ ID NO: 5643 - protein, 16 aa, Artificial Sequence
  source: /note="Description of Artificial Sequence: Synthetic peptide"
  MOD_RES (5)..(5): Citrulline
LKYVXGEHLSPDHWLD

SEQ ID NO: 5644 - protein, 16 aa, Artificial Sequence
  source: /note="Description of Artificial Sequence: Synthetic peptide"
  MOD_RES (3)..(3): Citrulline
  MOD_RES (9)..(9): Citrulline
LFXLLGLPXGTSLEKL

SEQ ID NO: 5645 - protein, 16 aa, Artificial Sequence
  source: /note="Description of Artificial Sequence: Synthetic peptide"
  MOD_RES (5)..(5): Citrulline
LGLPXGTSLEKLLFGD

SEQ ID NO: 5646 - protein, 16 aa, Artificial Sequence
  source: /note="Description of Artificial Sequence: Synthetic peptide"
  MOD_RES (10)..(10): Citrulline
WVYLEPIFGXGALPKE

SEQ ID NO: 5647 - protein, 16 aa, Artificial Sequence
  source: /note="Description of Artificial Sequence: Synthetic peptide"
  MOD_RES (6)..(6): Citrulline
  MOD_RES (15)..(15): Citrulline
EPIFGXGALPKEQTXF

SEQ ID NO: 5648 - protein, 16 aa, Artificial Sequence
  source: /note="Description of Artificial Sequence: Synthetic peptide"
  MOD_RES (7)..(7): Citrulline
FSPKISXGYELKQFKN

SEQ ID NO: 5649 - protein, 16 aa, Artificial Sequence
  source: /note="Description of Artificial Sequence: Synthetic peptide"
  MOD_RES (3)..(3): Citrulline
ISXGYELKQFKNDLKH

SEQ ID NO: 5650 - protein, 16 aa, Artificial Sequence
  source: /note="Description of Artificial Sequence: Synthetic peptide"
  MOD_RES (9)..(9): Citrulline
  MOD_RES (12)..(12): Citrulline
SMKSFLAKXGVXEDIA

SEQ ID NO: 5651 - protein, 16 aa, Artificial Sequence
  source: /note="Description of Artificial Sequence: Synthetic peptide"
  MOD_RES (5)..(5): Citrulline
  MOD_RES (8)..(8): Citrulline
FLAKXGVXEDIATFDA

SEQ ID NO: 5652 - protein, 16 aa, Artificial Sequence
  source: /note="Description of Artificial Sequence: Synthetic peptide"
  MOD_RES (8)..(8): Citrulline
  MOD_RES (12)..(12): Citrulline
EVNFTTTXSGLXGQLL

SEQ ID NO: 5653 - protein, 16 aa, Artificial Sequence
  source: /note="Description of Artificial Sequence: Synthetic peptide"
  MOD_RES (13)..(13): Citrulline
GEEQVVTADFINXGEY

SEQ ID NO: 5654 - protein, 16 aa, Artificial Sequence
  source: /note="Description of Artificial Sequence: Synthetic peptide"
  MOD_RES (9)..(9): Citrulline
VVTADFINXGEYEIDI

SEQ ID NO: 5655 - protein, 16 aa, Artificial Sequence
  source: /note="Description of Artificial Sequence: Synthetic peptide"
  MOD_RES (5)..(5): Citrulline
  MOD_RES (16)..(16): Citrulline
DFINXGEYEIDIAGYX

SEQ ID NO: 5656 - protein, 16 aa, Artificial Sequence
  source: /note="Description of Artificial Sequence: Synthetic peptide"
  MOD_RES (13)..(13): Citrulline
DETIQWPHVPSNXGSK

SEQ ID NO: 5657 - protein, 16 aa, Artificial Sequence
  source: /note="Description of Artificial Sequence: Synthetic peptide"
  MOD_RES (9)..(9): Citrulline
QWPHVPSNXGSKANLI

SEQ ID NO: 5658 - protein, 16 aa, Artificial Sequence
  source: /note="Description of Artificial Sequence: Synthetic peptide"
  MOD_RES (5)..(5): Citrulline
  MOD_RES (11)..(11): Citrulline
CGTFXNLFTKXGNIEN

SEQ ID NO: 5659 - protein, 16 aa, Artificial Sequence
  source: /note="Description of Artificial Sequence: Synthetic peptide"
  MOD_RES (1)..(1): Citrulline
  MOD_RES (7)..(7): Citrulline
XNLFTKXGNIENGHVK

SEQ ID NO: 5660 - protein, 16 aa, Artificial Sequence
  source: /note="Description of Artificial Sequence: Synthetic peptide"
  MOD_RES (14)..(14): Citrulline
QKMAKCAVQDYTYXGS

SEQ ID NO: 5661 - protein, 16 aa, Artificial Sequence
  source: /note="Description of Artificial Sequence: Synthetic peptide"
  MOD_RES (10)..(10): Citrulline
KCAVQDYTYXGSISGH

SEQ ID NO: 5662 - protein, 16 aa, Artificial Sequence
  source: /note="Description of Artificial Sequence: Synthetic peptide"
  MOD_RES (9)..(9): Citrulline
LFLPLLQPXGASAGSL

SEQ ID NO: 5663 - protein, 16 aa, Artificial Sequence
  source: /note="Description of Artificial Sequence: Synthetic peptide"
  MOD_RES (5)..(5): Citrulline
LLQPXGASAGSLHSPG

SEQ ID NO: 5664 - protein, 16 aa, Artificial Sequence
  source: /note="Description of Artificial Sequence: Synthetic peptide"
  MOD_RES (9)..(9): Citrulline
GAAAGGSVXGSGAVAE

SEQ ID NO: 5665 - protein, 16 aa, Artificial Sequence
  source: /note="Description of Artificial Sequence: Synthetic peptide"
  MOD_RES (5)..(5): Citrulline
  MOD_RES (15)..(15): Citrulline
GGSVXGSGAVAEGNXT

SEQ ID NO: 5666 - protein, 16 aa, Artificial Sequence
  source: /note="Description of Artificial Sequence: Synthetic peptide"
  MOD_RES (5)..(5): Citrulline
AISPXGLQALGQTFGA

SEQ ID NO: 5667 - protein, 16 aa, Artificial Sequence
  source: /note="Description of Artificial Sequence: Synthetic peptide"
  MOD_RES (3)..(3): Citrulline
  MOD_RES (7)..(7): Citrulline
VPXNFIXGALLEQAGQ

SEQ ID NO: 5668 - protein, 16 aa, Artificial Sequence
  source: /note="Description of Artificial Sequence: Synthetic peptide"
  MOD_RES (3)..(3): Citrulline
FIXGALLEQAGQDIQN

SEQ ID NO: 5669 - protein, 16 aa, Artificial Sequence
  source: /note="Description of Artificial Sequence: Synthetic peptide"
  MOD_RES (2)..(2): Citrulline
  MOD_RES (10)..(10): Citrulline
FXLEQGYTSXGSPLSP

SEQ ID NO: 5670 - protein, 16 aa, Artificial Sequence
  source: /note="Description of Artificial Sequence: Synthetic peptide"
  MOD_RES (6)..(6): Citrulline
QGYTSXGSPLSPQSSI

SEQ ID NO: 5671 - protein, 16 aa, Artificial Sequence
  source: /note="Description of Artificial Sequence: Synthetic peptide"
  MOD_RES (2)..(2): Citrulline
SXGSPLSPQSSIDSEL

SEQ ID NO: 5672 - protein, 16 aa, Artificial Sequence
  source: /note="Description of Artificial Sequence: Synthetic peptide"
  MOD_RES (11)..(11): Citrulline
GENASLPCPAXGTPKP

SEQ ID NO: 5673 - protein, 16 aa, Artificial Sequence
  source: /note="Description of Artificial Sequence: Synthetic peptide"
  MOD_RES (7)..(7): Citrulline
SLPCPAXGTPKPQVTW

SEQ ID NO: 5674 - protein, 16 aa, Artificial Sequence
  source: /note="Description of Artificial Sequence: Synthetic peptide"
  MOD_RES (3)..(3): Citrulline
  MOD_RES (13)..(13): Citrulline
PAXGTPKPQVTWXKGP

SEQ ID NO: 5675 - protein, 16 aa, Artificial Sequence
  source: /note="Description of Artificial Sequence: Synthetic peptide"
  MOD_RES (3)..(3): Citrulline
  MOD_RES (14)..(14): Citrulline
VVXGSLVELPCEAXGV

SEQ ID NO: 5676 - protein, 16 aa, Artificial Sequence
  source: /note="Description of Artificial Sequence: Synthetic peptide"
  MOD_RES (11)..(11): Citrulline
  MOD_RES (16)..(16): Citrulline
WSKAGAQLGAXGSGYX

SEQ ID NO: 5677 - protein, 16 aa, Artificial Sequence
  source: /note="Description of Artificial Sequence: Synthetic peptide"
  MOD_RES (7)..(7): Citrulline
  MOD_RES (12)..(12): Citrulline
GAQLGAXGSGYXVSPS

SEQ ID NO: 5678 - protein, 16 aa, Artificial Sequence
  source: /note="Description of Artificial Sequence: Synthetic peptide"
  MOD_RES (11)..(11): Citrulline
  MOD_RES (16)..(16): Citrulline
IHWIKDGLPLXGSHLX

SEQ ID NO: 5679 - protein, 16 aa, Artificial Sequence
  source: /note="Description of Artificial Sequence: Synthetic peptide"
  MOD_RES (7)..(7): Citrulline
  MOD_RES (12)..(12): Citrulline
KDGLPLXGSHLXHQLQ

SEQ ID NO: 5680 - protein, 16 aa, Artificial Sequence
  source: /note="Description of Artificial Sequence: Synthetic peptide"
  MOD_RES (3)..(3): Citrulline
  MOD_RES (8)..(8): Citrulline
PLXGSHLXHQLQNGSL

SEQ ID NO: 5681 - protein, 16 aa, Artificial Sequence
  source: /note="Description of Artificial Sequence: Synthetic peptide"
  MOD_RES (3)..(3): Citrulline
VVXGEPQGSWGSMTGV

SEQ ID NO: 5682 - protein, 16 aa, Artificial Sequence
  source: /note="Description of Artificial Sequence: Synthetic peptide"
  MOD_RES (13)..(13): Citrulline
IECGPGQMCFNTXGSY

SEQ ID NO: 5683 - protein, 16 aa, Artificial Sequence
  source: /note="Description of Artificial Sequence: Synthetic peptide"
  MOD_RES (9)..(9): Citrulline
PGQMCFNTXGSYQCVD

SEQ ID NO: 5684 - protein, 16 aa, Artificial Sequence
  source: /note="Description of Artificial Sequence: Synthetic peptide"
  MOD_RES (5)..(5): Citrulline
CFNTXGSYQCVDTPCP

SEQ ID NO: 5685 - protein, 16 aa, Artificial Sequence
  source: /note="Description of Artificial Sequence: Synthetic peptide"
  MOD_RES (13)..(13): Citrulline
  MOD_RES (16)..(16): Citrulline
AAEPSPLPGSLIXGQX

SEQ ID NO: 5686 - protein, 16 aa, Artificial Sequence
  source: /note="Description of Artificial Sequence: Synthetic peptide"
  MOD_RES (9)..(9): Citrulline
  MOD_RES (12)..(12): Citrulline
SPLPGSLIXGQXKSAS

SEQ ID NO: 5687 - protein, 16 aa, Artificial Sequence
  source: /note="Description of Artificial Sequence: Synthetic peptide"
  MOD_RES (9)..(9): Citrulline
  MOD_RES (15)..(15): Citrulline
PQMLNITGXGTPSNXK

SEQ ID NO: 5688 - protein, 16 aa, Artificial Sequence
  source: /note="Description of Artificial Sequence: Synthetic peptide"
  MOD_RES (5)..(5): Citrulline
  MOD_RES (11)..(11): Citrulline
NITGXGTPSNXKKLEY

SEQ ID NO: 5689 - protein, 16 aa, Artificial Sequence
  source: /note="Description of Artificial Sequence: Synthetic peptide"
  MOD_RES (4)..(4): Citrulline
  MOD_RES (8)..(8): Citrulline
EQAXTEYXGALLWMKD

SEQ ID NO: 5690 - protein, 16 aa, Artificial Sequence
  source: /note="Description of Artificial Sequence: Synthetic peptide"
  MOD_RES (4)..(4): Citrulline
TEYXGALLWMKDVSQE

SEQ ID NO: 5691 - protein, 16 aa, Artificial Sequence
  source: /note="Description of Artificial Sequence: Synthetic peptide"
  MOD_RES (15)..(15): Citrulline
KPYECKECGKSFNVXG

SEQ ID NO: 5692 - protein, 16 aa, Artificial Sequence
  source: /note="Description of Artificial Sequence: Synthetic peptide"
  MOD_RES (11)..(11): Citrulline
  MOD_RES (16)..(16): Citrulline
CKECGKSFNVXGQLNX

SEQ ID NO: 5693 - protein, 16 aa, Artificial Sequence
  source: /note="Description of Artificial Sequence: Synthetic peptide"
  MOD_RES (7)..(7): Citrulline
  MOD_RES (12)..(12): Citrulline
GKSFNVXGQLNXHKTI

SEQ ID NO: 5694 - protein, 16 aa, Artificial Sequence
  source: /note="Description of Artificial Sequence: Synthetic peptide"
  MOD_RES (14)..(15): Citrulline
KPYKCKECGKAFIXXG

SEQ ID NO: 5695 - protein, 16 aa, Artificial Sequence
  source: /note="Description of Artificial Sequence: Synthetic peptide"
  MOD_RES (10)..(11): Citrulline
CKECGKAFIXXGNLKE

SEQ ID NO: 5696 - protein, 16 aa, Artificial Sequence
  source: /note="Description of Artificial Sequence: Synthetic peptide"
  MOD_RES (6)..(7): Citrulline
GKAFIXXGNLKEHLKI

SEQ ID NO: 5697 - protein, 16 aa, Artificial Sequence
  source: /note="Description of Artificial Sequence: Synthetic peptide"
  MOD_RES (2)..(3): Citrulline
IXXGNLKEHLKIHSGL

SEQ ID NO: 5698 - protein, 16 aa, Artificial Sequence
  source: /note="Description of Artificial Sequence: Synthetic peptide"
  MOD_RES (10)..(11): Citrulline
CKECGKSFSXXGQFTE

SEQ ID NO: 5699 - protein, 16 aa, Artificial Sequence
  source: /note="Description of Artificial Sequence: Synthetic peptide"
  MOD_RES (6)..(7): Citrulline
GKSFSXXGQFTEHQKI

SEQ ID NO: 5700 - protein, 16 aa, Artificial Sequence
  source: /note="Description of Artificial Sequence: Synthetic peptide"
  MOD_RES (10)..(10): Citrulline
VQKKEWKGQXGATLDE

SEQ ID NO: 5701 - protein, 16 aa, Artificial Sequence
  source: /note="Description of Artificial Sequence: Synthetic peptide"
  MOD_RES (6)..(6): Citrulline
EWKGQXGATLDEEELT

SEQ ID NO: 5702 - protein, 16 aa, Artificial Sequence
  source: /note="Description of Artificial Sequence: Synthetic peptide"
  MOD_RES (9)..(9): Citrulline
ETPTEYLQXGFNLPYQ

SEQ ID NO: 5703 - protein, 16 aa, Artificial Sequence
  source: /note="Description of Artificial Sequence: Synthetic peptide"
  MOD_RES (5)..(5): Citrulline
  MOD_RES (15)..(15): Citrulline
EYLQXGFNLPYQDAXK

SEQ ID NO: 5704 - protein, 16 aa, Artificial Sequence
  source: /note="Description of Artificial Sequence: Synthetic peptide"
  MOD_RES (9)..(9): Citrulline
FPYHVAHPXGSAHSMT

SEQ ID NO: 5705 - protein, 16 aa, Artificial Sequence
  source: /note="Description of Artificial Sequence: Synthetic peptide"
  MOD_RES (5)..(5): Citrulline
  MOD_RES (13)..(13): Citrulline
VAHPXGSAHSMTXSSS

SEQ ID NO: 5706 - protein, 16 aa, Artificial Sequence
  source: /note="Description of Artificial Sequence: Synthetic peptide"
  MOD_RES (6)..(6): Citrulline
  MOD_RES (11)..(11): Citrulline
VPLKVXEYYSXGQQCL

SEQ ID NO: 5707 - protein, 16 aa, Artificial Sequence
  source: /note="Description of Artificial Sequence: Synthetic peptide"
  MOD_RES (2)..(2): Citrulline
  MOD_RES (7)..(7): Citrulline
VXEYYSXGQQCLEQAD

SEQ ID NO: 5708 - protein, 16 aa, Artificial Sequence
  source: /note="Description of Artificial Sequence: Synthetic peptide"
  MOD_RES (3)..(3): Citrulline
YSXGQQCLEQADWETA

SEQ ID NO: 5709 - protein, 16 aa, Artificial Sequence
  source: /note="Description of Artificial Sequence: Synthetic peptide"
  MOD_RES (12)..(12): Citrulline
MFESDFIQISKXGEVI

SEQ ID NO: 5710 - protein, 16 aa, Artificial Sequence
  source: /note="Description of Artificial Sequence: Synthetic peptide"
  MOD_RES (8)..(8): Citrulline
DFIQISKXGEVIDVHN

SEQ ID NO: 5711 - protein, 16 aa, Artificial Sequence
  source: /note="Description of Artificial Sequence: Synthetic peptide"
  MOD_RES (11)..(11): Citrulline
ATGGAGFCISXGLALK

SEQ ID NO: 5712 - protein, 16 aa, Artificial Sequence
  source: /note="Description of Artificial Sequence: Synthetic peptide"
  MOD_RES (7)..(7): Citrulline
AGFCISXGLALKMSPW

SEQ ID NO: 5713 - protein, 16 aa, Artificial Sequence
  source: /note="Description of Artificial Sequence: Synthetic peptide"
  MOD_RES (3)..(3): Citrulline
ISXGLALKMSPWASGG

SEQ ID NO: 5714 - protein, 16 aa, Artificial Sequence
  source: /note="Description of Artificial Sequence: Synthetic peptide"
  MOD_RES (9)..(9): Citrulline
FMSQVLPAXGKFKEIC

SEQ ID NO: 5715 - protein, 16 aa, Artificial Sequence
  source: /note="Description of Artificial Sequence: Synthetic peptide"
  MOD_RES (5)..(5): Citrulline
  MOD_RES (14)..(14): Citrulline
VLPAXGKFKEICEXPN

SEQ ID NO: 5716 - protein, 16 aa, Artificial Sequence
  source: /note="Description of Artificial Sequence: Synthetic peptide"
  MOD_RES (11)..(11): Citrulline
LGWANMLYYTXGFQSM

SEQ ID NO: 5717 - protein, 16 aa, Artificial Sequence
  source: /note="Description of Artificial Sequence: Synthetic peptide"
  MOD_RES (7)..(7): Citrulline
NMLYYTXGFQSMGMYS

SEQ ID NO: 5718 - protein, 16 aa, Artificial Sequence
  source: /note="Description of Artificial Sequence: Synthetic peptide"
  MOD_RES (14)..(14): Citrulline
GGSVTDLVKGFLKXGE

SEQ ID NO: 5719 - protein, 16 aa, Artificial Sequence
  source: /note="Description of Artificial Sequence: Synthetic peptide"
  MOD_RES (10)..(10): Citrulline
  MOD_RES (13)..(13): Citrulline
TDLVKGFLKXGEXMSE

SEQ ID NO: 5720 - protein, 16 aa, Artificial Sequence
  source: /note="Description of Artificial Sequence: Synthetic peptide"
  MOD_RES (6)..(6): Citrulline
  MOD_RES (9)..(9): Citrulline
KGFLKXGEXMSEPLIA

SEQ ID NO: 5721 - protein, 16 aa, Artificial Sequence
  source: /note="Description of Artificial Sequence: Synthetic peptide"
  MOD_RES (10)..(10): Citrulline
  MOD_RES (16)..(16): Citrulline
ALTSHCVVTXGETIIX

SEQ ID NO: 5722 - protein, 16 aa, Artificial Sequence
  source: /note="Description of Artificial Sequence: Synthetic peptide"
  MOD_RES (6)..(6): Citrulline
  MOD_RES (12)..(12): Citrulline
HCVVTXGETIIXPNTV

SEQ ID NO: 5723 - protein, 16 aa, Artificial Sequence
  source: /note="Description of Artificial Sequence: Synthetic peptide"
  MOD_RES (8)..(8): Citrulline
AGPPMPVXGAAVQAKI

SEQ ID NO: 5724 - protein, 16 aa, Artificial Sequence
  source: /note="Description of Artificial Sequence: Synthetic peptide"
  MOD_RES (4)..(4): Citrulline
MPVXGAAVQAKIYNSP

SEQ ID NO: 5725 - protein, 16 aa, Artificial Sequence
  source: /note="Description of Artificial Sequence: Synthetic peptide"
  MOD_RES (11)..(11): Citrulline
IDPADKYVYPXGFQEN

SEQ ID NO: 5726 - protein, 16 aa, Artificial Sequence
  source: /note="Description of Artificial Sequence: Synthetic peptide"
  MOD_RES (7)..(7): Citrulline
  MOD_RES (14)..(14): Citrulline
DKYVYPXGFQENKXYE

SEQ ID NO: 5727 - protein, 16 aa, Artificial Sequence
  source: /note="Description of Artificial Sequence: Synthetic peptide"
  MOD_RES (5)..(5): Citrulline
  MOD_RES (15)..(15): Citrulline
GVTKXGETLSWLKSXL

SEQ ID NO: 5728 - protein, 16 aa, Artificial Sequence
  source: /note="Description of Artificial Sequence: Synthetic peptide"
  MOD_RES (9)..(9): Citrulline
SSFLTWLEXGEAKASS

SEQ ID NO: 5729 - protein, 16 aa, Artificial Sequence
  source: /note="Description of Artificial Sequence: Synthetic peptide"
  MOD_RES (5)..(5): Citrulline
TWLEXGEAKASSPEMD

SEQ ID NO: 5730 - protein, 16 aa, Artificial Sequence
  source: /note="Description of Artificial Sequence: Synthetic peptide"
  MOD_RES (3)..(3): Citrulline
  MOD_RES (12)..(12): Citrulline
AAXESLDKLSQXGQLL

SEQ ID NO: 5731 - protein, 16 aa, Artificial Sequence
  source: /note="Description of Artificial Sequence: Synthetic peptide"
  MOD_RES (8)..(8): Citrulline
SLDKLSQXGQLLSEEG

SEQ ID NO: 5732 - protein, 16 aa, Artificial Sequence
  source: /note="Description of Artificial Sequence: Synthetic peptide"
  MOD_RES (11)..(11): Citrulline
KEIQMKMIVTXGESVL

SEQ ID NO: 5733 - protein, 16 aa, Artificial Sequence
  source: /note="Description of Artificial Sequence: Synthetic peptide"
  MOD_RES (7)..(7): Citrulline
MKMIVTXGESVLQNTS

SEQ ID NO: 5734 - protein, 16 aa, Artificial Sequence
  source: /note="Description of Artificial Sequence: Synthetic peptide"
  MOD_RES (3)..(3): Citrulline
VTXGESVLQNTSPEGI

SEQ ID NO: 5735 - protein, 16 aa, Artificial Sequence
  source: /note="Description of Artificial Sequence: Synthetic peptide"
  MOD_RES (5)..(5): Citrulline
  MOD_RES (10)..(10): Citrulline
KSLLXSVASXGEEILI

SEQ ID NO: 5736 - protein, 16 aa, Artificial Sequence
  source: /note="Description of Artificial Sequence: Synthetic peptide"
  MOD_RES (1)..(1): Citrulline
  MOD_RES (6)..(6): Citrulline
XSVASXGEEILIQHSA

SEQ ID NO: 5737 - protein, 16 aa, Artificial Sequence
  source: /note="Description of Artificial Sequence: Synthetic peptide"
  MOD_RES (9)..(10): Citrulline
DAGIIELKXXGDKLQV

SEQ ID NO: 5738 - protein, 16 aa, Artificial Sequence
  source: /note="Description of Artificial Sequence: Synthetic peptide"
  MOD_RES (5)..(6): Citrulline
IELKXXGDKLQVEQPS

SEQ ID NO: 5739 - protein, 16 aa, Artificial Sequence
  source: /note="Description of Artificial Sequence: Synthetic peptide"
  MOD_RES (1)..(2): Citrulline
XXGDKLQVEQPSMQEL

SEQ ID NO: 5740 - protein, 16 aa, Artificial Sequence
  source: /note="Description of Artificial Sequence: Synthetic peptide"
  MOD_RES (7)..(7): Citrulline
LADALSXGHVLGGSQP

SEQ ID NO: 5741 - protein, 16 aa, Artificial Sequence
  source: /note="Description of Artificial Sequence: Synthetic peptide"
  MOD_RES (3)..(3): Citrulline
LSXGHVLGGSQPELVT

SEQ ID NO: 5742 - protein, 16 aa, Artificial Sequence
  source: /note="Description of Artificial Sequence: Synthetic peptide"
  MOD_RES (5)..(5): Citrulline
  MOD_RES (11)..(11): Citrulline
ENNCXCPGPVXGGKEP

SEQ ID NO: 5743 - protein, 16 aa, Artificial Sequence
  source: /note="Description of Artificial Sequence: Synthetic peptide"
  MOD_RES (1)..(1): Citrulline
  MOD_RES (7)..(7): Citrulline
XCPGPVXGGKEPGPVL

SEQ ID NO: 5744 - protein, 16 aa, Artificial Sequence
  source: /note="Description of Artificial Sequence: Synthetic peptide"
  MOD_RES (1)..(1): Citrulline
  MOD_RES (9)..(9): Citrulline
XWGLTQFLXGTSPVTQ

SEQ ID NO: 5745 - protein, 16 aa, Artificial Sequence
  source: /note="Description of Artificial Sequence: Synthetic peptide"
  MOD_RES (5)..(5): Citrulline
TQFLXGTSPVTQSVPF

SEQ ID NO: 5746 - protein, 16 aa, Artificial Sequence
  source: /note="Description of Artificial Sequence: Synthetic peptide"
  MOD_RES (10)..(10): Citrulline
VYVGVDVFAXGNVVGG

SEQ ID NO: 5747 - protein, 16 aa, Artificial Sequence
  source: /note="Description of Artificial Sequence: Synthetic peptide"
  MOD_RES (6)..(6): Citrulline
  MOD_RES (13)..(13): Citrulline
VDVFAXGNVVGGXFDT

SEQ ID NO: 5748 - protein, 16 aa, Artificial Sequence
  source: /note="Description of Artificial Sequence: Synthetic peptide"
  MOD_RES (11)..(11): Citrulline
LCLKYGESASXGSVAE

SEQ ID NO: 5749 - protein, 16 aa, Artificial Sequence
  source: /note="Description of Artificial Sequence: Synthetic peptide"
  MOD_RES (7)..(7): Citrulline
YGESASXGSVAESSGG

SEQ ID NO: 5750 - protein, 16 aa, Artificial Sequence
  source: /note="Description of Artificial Sequence: Synthetic peptide"
  MOD_RES (13)..(13): Citrulline
GSKQSQTEPEGAXGSK

SEQ ID NO: 5751 - protein, 16 aa, Artificial Sequence
  source: /note="Description of Artificial Sequence: Synthetic peptide"
  MOD_RES (9)..(9): Citrulline
SQTEPEGAXGSKAAFL

SEQ ID NO: 5752 - protein, 16 aa, Artificial Sequence
  source: /note="Description of Artificial Sequence: Synthetic peptide"
  MOD_RES (5)..(5): Citrulline
  MOD_RES (13)..(13): Citrulline
PEGAXGSKAAFLXQPS

SEQ ID NO: 5753 - protein, 16 aa, Artificial Sequence
  source: /note="Description of Artificial Sequence: Synthetic peptide"
  MOD_RES (6)..(6): Citrulline
  MOD_RES (11)..(11): Citrulline
SNPPAXFIWKXGSDTL

SEQ ID NO: 5754 - protein, 16 aa, Artificial Sequence
  source: /note="Description of Artificial Sequence: Synthetic peptide"
  MOD_RES (2)..(2): Citrulline
  MOD_RES (7)..(7): Citrulline
AXFIWKXGSDTLSHSQ

SEQ ID NO: 5755 - protein, 16 aa, Artificial Sequence
  source: /note="Description of Artificial Sequence: Synthetic peptide"
  MOD_RES (3)..(3): Citrulline
WKXGSDTLSHSQDNGV

SEQ ID NO: 5756 - protein, 16 aa, Artificial Sequence
  source: /note="Description of Artificial Sequence: Synthetic peptide"
  MOD_RES (8)..(8): Citrulline
  MOD_RES (10)..(10): Citrulline
QSSFLWQXGXKFLQKH

SEQ ID NO: 5757 - protein, 16 aa, Artificial Sequence
  source: /note="Description of Artificial Sequence: Synthetic peptide"
  MOD_RES (4)..(4): Citrulline
  MOD_RES (6)..(6): Citrulline
LWQXGXKFLQKHLNAS

SEQ ID NO: 5758 - protein, 16 aa, Artificial Sequence
  source: /note="Description of Artificial Sequence: Synthetic peptide"
  MOD_RES (11)..(11): Citrulline
VPPVYTVSQAXGSSPV

SEQ ID NO: 5759 - protein, 16 aa, Artificial Sequence
  source: /note="Description of Artificial Sequence: Synthetic peptide"
  MOD_RES (7)..(7): Citrulline
YTVSQAXGSSPVSLDL

SEQ ID NO: 5760 - protein, 16 aa, Artificial Sequence
  source: /note="Description of Artificial Sequence: Synthetic peptide"
  MOD_RES (2)..(2): Citrulline
  MOD_RES (12)..(12): Citrulline
SXKPVDSVPLSXGKEL

SEQ ID NO: 5761 - protein, 16 aa, Artificial Sequence
  source: /note="Description of Artificial Sequence: Synthetic peptide"
  MOD_RES (8)..(8): Citrulline
VDSVPLSXGKELLQKA

SEQ ID NO: 5762 - protein, 16 aa, Artificial Sequence
  source: /note="Description of Artificial Sequence: Synthetic peptide"
  MOD_RES (9)..(9): Citrulline
LLLLGAGPXGSSLANP

SEQ ID NO: 5763 - protein, 16 aa, Artificial Sequence
  source: /note="Description of Artificial Sequence: Synthetic peptide"
  MOD_RES (5)..(5): Citrulline
GAGPXGSSLANPVPAA

SEQ ID NO: 5764 - protein, 16 aa, Artificial Sequence
  source: /note="Description of Artificial Sequence: Synthetic peptide"
  MOD_RES (9)..(9): Citrulline
GGNHQSGIXGDAKGQV

SEQ ID NO: 5765 - protein, 16 aa, Artificial Sequence
  source: /note="Description of Artificial Sequence: Synthetic peptide"
  MOD_RES (5)..(5): Citrulline
QSGIXGDAKGQVALLS

SEQ ID NO: 5766 - protein, 16 aa, Artificial Sequence
  source: /note="Description of Artificial Sequence: Synthetic peptide"
  MOD_RES (11)..(11): Citrulline
  MOD_RES (16)..(16): Citrulline
AAAYALGSLLXGSSTX

SEQ ID NO: 5767 - protein, 16 aa, Artificial Sequence
  source: /note="Description of Artificial Sequence: Synthetic peptide"
  MOD_RES (7)..(7): Citrulline
  MOD_RES (12)..(12): Citrulline
ALGSLLXGSSTXSGSQ

SEQ ID NO: 5768 - protein, 16 aa, Artificial Sequence
  source: /note="Description of Artificial Sequence: Synthetic peptide"
  MOD_RES (3)..(3): Citrulline
  MOD_RES (8)..(8): Citrulline
LLXGSSTXSGSQEALG

SEQ ID NO: 5769 - protein, 16 aa, Artificial Sequence
  source: /note="Description of Artificial Sequence: Synthetic peptide"
  MOD_RES (2)..(2): Citrulline
  MOD_RES (12)..(12): Citrulline
QXPALGLLEGVXGVLS

SEQ ID NO: 5770 - protein, 16 aa, Artificial Sequence
  source: /note="Description of Artificial Sequence: Synthetic peptide"
  MOD_RES (8)..(8): Citrulline
  MOD_RES (13)..(13): Citrulline
LGLLEGVXGVLSXSKA

SEQ ID NO: 5771 - protein, 16 aa, Artificial Sequence
  source: /note="Description of Artificial Sequence: Synthetic peptide"
  MOD_RES (9)..(9): Citrulline
SLDHFYCDXGQLLKLS

SEQ ID NO: 5772 - protein, 16 aa, Artificial Sequence
  source: /note="Description of Artificial Sequence: Synthetic peptide"
  MOD_RES (5)..(5): Citrulline
FYCDXGQLLKLSCDNT

SEQ ID NO: 5773 - protein, 16 aa, Artificial Sequence
  source: /note="Description of Artificial Sequence: Synthetic peptide"
  MOD_RES (1)..(1): Citrulline
XGQLLKLSCDNTLLTE

SEQ ID NO: 5774 - protein, 16 aa, Artificial Sequence
  source: /note="Description of Artificial Sequence: Synthetic peptide"
  MOD_RES (9)..(9): Citrulline
VVNNFFCDXGQLLKLS

SEQ ID NO: 5775 - protein, 16 aa, Artificial Sequence
  source: /note="Description of Artificial Sequence: Synthetic peptide"
  MOD_RES (5)..(5): Citrulline
FFCDXGQLLKLSCNNT

SEQ ID NO: 5776 - protein, 16 aa, Artificial Sequence
  source: /note="Description of Artificial Sequence: Synthetic peptide"
  MOD_RES (13)..(13): Citrulline
  MOD_RES (16)..(16): Citrulline
FTFTPITMTFPFXGSX

SEQ ID NO: 5777 - protein, 16 aa, Artificial Sequence
  source: /note="Description of Artificial Sequence: Synthetic peptide"
  MOD_RES (9)..(9): Citrulline
  MOD_RES (12)..(12): Citrulline
PITMTFPFXGSXEIHH

SEQ ID NO: 5778 - protein, 16 aa, Artificial Sequence
  source: /note="Description of Artificial Sequence: Synthetic peptide"
  MOD_RES (9)..(9): Citrulline
HIGVAAVVXGSLLMLP

SEQ ID NO: 5779 - protein, 16 aa, Artificial Sequence
  source: /note="Description of Artificial Sequence: Synthetic peptide"
  MOD_RES (5)..(5): Citrulline
AAVVXGSLLMLPCPFL

SEQ ID NO: 5780 - protein, 16 aa, Artificial Sequence
  source: /note="Description of Artificial Sequence: Synthetic peptide"
  MOD_RES (9)..(9): Citrulline
  MOD_RES (12)..(12): Citrulline
KTVLGIVSXGEXLKTL

SEQ ID NO: 5781 - protein, 16 aa, Artificial Sequence
  source: /note="Description of Artificial Sequence: Synthetic peptide"
  MOD_RES (5)..(5): Citrulline
  MOD_RES (8)..(8): Citrulline
GIVSXGEXLKTLSTCL

SEQ ID NO: 5782 - protein, 16 aa, Artificial Sequence
  source: /note="Description of Artificial Sequence: Synthetic peptide"
  MOD_RES (11)..(11): Citrulline
HACNPSTLGGXGGWIM

SEQ ID NO: 5783 - protein, 16 aa, Artificial Sequence
  source: /note="Description of Artificial Sequence: Synthetic peptide"
  MOD_RES (7)..(7): Citrulline
  MOD_RES (13)..(13): Citrulline
PSTLGGXGGWIMXSGD

SEQ ID NO: 5784 - protein, 16 aa, Artificial Sequence
  source: /note="Description of Artificial Sequence: Synthetic peptide"
  MOD_RES (10)..(10): Citrulline
  MOD_RES (13)..(13): Citrulline
LSDHGNGLGXGTXGSG

SEQ ID NO: 5785 - protein, 16 aa, Artificial Sequence
  source: /note="Description of Artificial Sequence: Synthetic peptide"
  MOD_RES (6)..(6): Citrulline
  MOD_RES (9)..(9): Citrulline
GNGLGXGTXGSGCSGG

SEQ ID NO: 5786 - protein, 16 aa, Artificial Sequence
  source: /note="Description of Artificial Sequence: Synthetic peptide"
  MOD_RES (13)..(13): Citrulline
MPDGATLAIGSSXGKI

SEQ ID NO: 5787 - protein, 16 aa, Artificial Sequence
  source: /note="Description of Artificial Sequence: Synthetic peptide"
  MOD_RES (9)..(9): Citrulline
ATLAIGSSXGKIYQYD

SEQ ID NO: 5788 - protein, 16 aa, Artificial Sequence
  source: /note="Description of Artificial Sequence: Synthetic peptide"
  MOD_RES (5)..(5): Citrulline
  MOD_RES (14)..(14): Citrulline
IGSSXGKIYQYDLXML

SEQ ID NO: 5789 - protein, 16 aa, Artificial Sequence
  source: /note="Description of Artificial Sequence: Synthetic peptide"
  MOD_RES (9)..(9): Citrulline
PAVVFQTKXGKQVCAD

SEQ ID NO: 5790 - protein, 16 aa, Artificial Sequence
  source: /note="Description of Artificial Sequence: Synthetic peptide"
  MOD_RES (5)..(5): Citrulline
FQTKXGKQVCADPSES

SEQ ID NO: 5791 - protein, 16 aa, Artificial Sequence
  source: /note="Description of Artificial Sequence: Synthetic peptide"
  MOD_RES (7)..(7): Citrulline
LLWKKAXGAPVLEKTL

SEQ ID NO: 5792 - protein, 16 aa, Artificial Sequence
  source: /note="Description of Artificial Sequence: Synthetic peptide"
  MOD_RES (3)..(3): Citrulline
KAXGAPVLEKTLGYNI

SEQ ID NO: 5793 - protein, 16 aa, Artificial Sequence
  source: /note="Description of Artificial Sequence: Synthetic peptide"
  MOD_RES (3)..(3): Citrulline
  MOD_RES (11)..(11): Citrulline
GDXLAGVFGSXGLKHG

SEQ ID NO: 5794 - protein, 16 aa, Artificial Sequence
  source: /note="Description of Artificial Sequence: Synthetic peptide"
  MOD_RES (7)..(7): Citrulline
AGVFGSXGLKHGGVQA

SEQ ID NO: 5795 - protein, 16 aa, Artificial Sequence
  source: /note="Description of Artificial Sequence: Synthetic peptide"
  MOD_RES (11)..(11): Citrulline
DALGISIAGGXGSPLG

SEQ ID NO: 5796 - protein, 16 aa, Artificial Sequence
  source: /note="Description of Artificial Sequence: Synthetic peptide"
  MOD_RES (7)..(7): Citrulline
ISIAGGXGSPLGDIPV

SEQ ID NO: 5797 - protein, 16 aa, Artificial Sequence
  source: /note="Description of Artificial Sequence: Synthetic peptide"
  MOD_RES (3)..(3): Citrulline
GGXGSPLGDIPVFIAM

SEQ ID NO: 5798 - protein, 16 aa, Artificial Sequence
  source: /note="Description of Artificial Sequence: Synthetic peptide"
  MOD_RES (13)..(13): Citrulline
TVDVYNMQSGIHXGSF

SEQ ID NO: 5799 - protein, 16 aa, Artificial Sequence
  source: /note="Description of Artificial Sequence: Synthetic peptide"
  MOD_RES (9)..(9): Citrulline
YNMQSGIHXGSFGKDQ

SEQ ID NO: 5800 - protein, 16 aa, Artificial Sequence
  source: /note="Description of Artificial Sequence: Synthetic peptide"
  MOD_RES (11)..(11): Citrulline
GKDQAHKGSVXGVAVD

SEQ ID NO: 5801 - protein, 16 aa, Artificial Sequence
  source: /note="Description of Artificial Sequence: Synthetic peptide"
  MOD_RES (7)..(7): Citrulline
AHKGSVXGVAVDGLNQ

SEQ ID NO: 5802 - protein, 16 aa, Artificial Sequence
  source: /note="Description of Artificial Sequence: Synthetic peptide"
  MOD_RES (1)..(1): Citrulline
  MOD_RES (7)..(7): Citrulline
XTLCKVXGAALKLGQM

SEQ ID NO: 5803 - protein, 16 aa, Artificial Sequence
  source: /note="Description of Artificial Sequence: Synthetic peptide"
  MOD_RES (3)..(3): Citrulline
KVXGAALKLGQMLSIQ

SEQ ID NO: 5804 - protein, 16 aa, Artificial Sequence
  source: /note="Description of Artificial Sequence: Synthetic peptide"
  MOD_RES (7)..(7): Citrulline
VFFQSPXGGAGGSPGS

SEQ ID NO: 5805 - protein, 16 aa, Artificial Sequence
  source: /note="Description of Artificial Sequence: Synthetic peptide"
  MOD_RES (3)..(3): Citrulline
SPXGGAGGSPGSSSGS

SEQ ID NO: 5806 - protein, 16 aa, Artificial Sequence
  source: /note="Description of Artificial Sequence: Synthetic peptide"
  MOD_RES (10)..(10): Citrulline
  MOD_RES (13)..(13): Citrulline
GTEKGAVLMXGSXHLK

SEQ ID NO: 5807 - protein, 16 aa, Artificial Sequence
  source: /note="Description of Artificial Sequence: Synthetic peptide"
  MOD_RES (6)..(6): Citrulline
  MOD_RES (9)..(9): Citrulline
GAVLMXGSXHLKKMTE

SEQ ID NO: 5808 - protein, 16 aa, Artificial Sequence
  source: /note="Description of Artificial Sequence: Synthetic peptide"
  MOD_RES (15)..(15): Citrulline
YEPLLKNNSTAYSTXG

SEQ ID NO: 5809 - protein, 16 aa, Artificial Sequence
  source: /note="Description of Artificial Sequence: Synthetic peptide"
  MOD_RES (11)..(11): Citrulline
  MOD_RES (14)..(14): Citrulline
LKNNSTAYSTXGNXIE

SEQ ID NO: 5810 - protein, 16 aa, Artificial Sequence
  source: /note="Description of Artificial Sequence: Synthetic peptide"
  MOD_RES (7)..(7): Citrulline
  MOD_RES (10)..(10): Citrulline
STAYSTXGNXIEISYE

SEQ ID NO: 5811 - protein, 16 aa, Artificial Sequence
  source: /note="Description of Artificial Sequence: Synthetic peptide"
  MOD_RES (8)..(8): Citrulline
WGSGSSFXGTPGGGGP

SEQ ID NO: 5812 - protein, 16 aa, Artificial Sequence
  source: /note="Description of Artificial Sequence: Synthetic peptide"
  MOD_RES (10)..(10): Citrulline
  MOD_RES (14)..(14): Citrulline
KPYECKECGXAFIXGS

SEQ ID NO: 5813 - protein, 16 aa, Artificial Sequence
  source: /note="Description of Artificial Sequence: Synthetic peptide"
  MOD_RES (6)..(6): Citrulline
  MOD_RES (10)..(10): Citrulline
CKECGXAFIXGSLLMQ

SEQ ID NO: 5814 - protein, 16 aa, Artificial Sequence
  source: /note="Description of Artificial Sequence: Synthetic peptide"
  MOD_RES (14)..(14): Citrulline
KPYKCEECGKAFIXGS

SEQ ID NO: 5815 - protein, 16 aa, Artificial Sequence
  source: /note="Description of Artificial Sequence: Synthetic peptide"
  MOD_RES (10)..(10): Citrulline
CEECGKAFIXGSQLTQ

SEQ ID NO: 5816 - protein, 16 aa, Artificial Sequence
  source: /note="Description of Artificial Sequence: Synthetic peptide"
  MOD_RES (6)..(6): Citrulline
  MOD_RES (15)..(15): Citrulline
GKAFIXGSQLTQHQXI

SEQ ID NO: 5817 - protein, 16 aa, Artificial Sequence
  source: /note="Description of Artificial Sequence: Synthetic peptide"
  MOD_RES (14)..(14): Citrulline
KPYECKECGKTFSXGS

SEQ ID NO: 5818 - protein, 16 aa, Artificial Sequence
  source: /note="Description of Artificial Sequence: Synthetic peptide"
  MOD_RES (10)..(10): Citrulline
CKECGKTFSXGSELTQ

SEQ ID NO: 5819 - protein, 16 aa, Artificial Sequence
  source: /note="Description of Artificial Sequence: Synthetic peptide"
  MOD_RES (6)..(6): Citrulline
  MOD_RES (15)..(15): Citrulline
GKTFSXGSELTQHEXI

SEQ ID NO: 5820 - protein, 16 aa, Artificial Sequence
  source: /note="Description of Artificial Sequence: Synthetic peptide"
  MOD_RES (14)..(14): Citrulline
KPYECKECGKSFIXGS

SEQ ID NO: 5821 - protein, 16 aa, Artificial Sequence
  source: /note="Description of Artificial Sequence: Synthetic peptide"
  MOD_RES (10)..(10): Citrulline
CKECGKSFIXGSQLTQ

SEQ ID NO: 5822 - protein, 16 aa, Artificial Sequence
  source: /note="Description of Artificial Sequence: Synthetic peptide"
  MOD_RES (6)..(6): Citrulline
  MOD_RES (15)..(15): Citrulline
GKSFIXGSQLTQHQXI

SEQ ID NO: 5823 - protein, 16 aa, Artificial Sequence
  source: /note="Description of Artificial Sequence: Synthetic peptide"
  MOD_RES (14)..(14): Citrulline
KPYQCKECGKAFIXGS

SEQ ID NO: 5824 - protein, 16 aa, Artificial Sequence
  source: /note="Description of Artificial Sequence: Synthetic peptide"
  MOD_RES (10)..(10): Citrulline
CKECGKAFIXGSQLTQ

SEQ ID NO: 5825 - protein, 16 aa, Artificial Sequence
  source: /note="Description of Artificial Sequence: Synthetic peptide"
  MOD_RES (14)..(14): Citrulline
KPYQCKECGKAFTXGS

SEQ ID NO: 5826 - protein, 16 aa, Artificial Sequence
  source: /note="Description of Artificial Sequence: Synthetic peptide"
  MOD_RES (10)..(10): Citrulline
CKECGKAFTXGSQLTQ

SEQ ID NO: 5827 - protein, 16 aa, Artificial Sequence
  source: /note="Description of Artificial Sequence: Synthetic peptide"
  MOD_RES (6)..(6): Citrulline
  MOD_RES (15)..(15): Citrulline
GKAFTXGSQLTQHQXI

SEQ ID NO: 5828 - protein, 16 aa, Artificial Sequence
  source: /note="Description of Artificial Sequence: Synthetic peptide"
  MOD_RES (1)..(1): Citrulline
  MOD_RES (12)..(12): Citrulline
XVLPGQAVTGVXGSAL

SEQ ID NO: 5829 - protein, 16 aa, Artificial Sequence
  source: /note="Description of Artificial Sequence: Synthetic peptide"
  MOD_RES (8)..(8): Citrulline
  MOD_RES (13)..(13): Citrulline
GQAVTGVXGSALXSLQ

SEQ ID NO: 5830 - protein, 16 aa, Artificial Sequence
  source: /note="Description of Artificial Sequence: Synthetic peptide"
  MOD_RES (10)..(10): Citrulline
WEVAKAFMPXGLADKQ

SEQ ID NO: 5831 - protein, 16 aa, Artificial Sequence
  source: /note="Description of Artificial Sequence: Synthetic peptide"
  MOD_RES (6)..(6): Citrulline
KAFMPXGLADKQGPEE

SEQ ID NO: 5832 - protein, 16 aa, Artificial Sequence
  source: /note="Description of Artificial Sequence: Synthetic peptide"
  MOD_RES (11)..(11): Citrulline
  MOD_RES (14)..(14): Citrulline
PLDNEVKAFMXGQXLY

SEQ ID NO: 5833 - protein, 16 aa, Artificial Sequence
  source: /note="Description of Artificial Sequence: Synthetic peptide"
  MOD_RES (7)..(7): Citrulline
  MOD_RES (10)..(10): Citrulline
EVKAFMXGQXLYEKLM

SEQ ID NO: 5834 - protein, 16 aa, Artificial Sequence
  source: /note="Description of Artificial Sequence: Synthetic peptide"
  MOD_RES (10)..(10): Citrulline
DVCGSLLQSXGMVILQ

SEQ ID NO: 5835 - protein, 16 aa, Artificial Sequence
  source: /note="Description of Artificial Sequence: Synthetic peptide"
  MOD_RES (6)..(6): Citrulline
  MOD_RES (16)..(16): Citrulline
SLLQSXGMVILQWGKX

SEQ ID NO: 5836 - protein, 16 aa, Artificial Sequence
  source: /note="Description of Artificial Sequence: Synthetic peptide"
  MOD_RES (6)..(6): Citrulline
  MOD_RES (12)..(12): Citrulline
VKYKEXGKAFTXGLHL

SEQ ID NO: 5837 - protein, 16 aa, Artificial Sequence
  source: /note="Description of Artificial Sequence: Synthetic peptide"
  MOD_RES (2)..(2): Citrulline
  MOD_RES (8)..(8): Citrulline
EXGKAFTXGLHLGHQK

SEQ ID NO: 5838 - protein, 16 aa, Artificial Sequence
  source: /note="Description of Artificial Sequence: Synthetic peptide"
  MOD_RES (11)..(11): Citrulline
KCEECGKAFNXGSYLT

SEQ ID NO: 5839 - protein, 16 aa, Artificial Sequence
  source: /note="Description of Artificial Sequence: Synthetic peptide"
  MOD_RES (7)..(7): Citrulline
  MOD_RES (16)..(16): Citrulline
CGKAFNXGSYLTQHQX

SEQ ID NO: 5840 - protein, 16 aa, Artificial Sequence
  source: /note="Description of Artificial Sequence: Synthetic peptide"
  MOD_RES (4)..(4): Citrulline
  MOD_RES (6)..(6): Citrulline
SVTXFXGMISTQPGST

SEQ ID NO: 5841 - protein, 16 aa, Artificial Sequence
  source: /note="Description of Artificial Sequence: Synthetic peptide"
  MOD_RES (2)..(2): Citrulline
FXGMISTQPGSTPLAS

SEQ ID NO: 5842 - protein, 16 aa, Artificial Sequence
  source: /note="Description of Artificial Sequence: Synthetic peptide"
  MOD_RES (11)..(11): Citrulline
  MOD_RES (15)..(15): Citrulline
VHVAPTPDTYXGKYXE

SEQ ID NO: 5843 - protein, 16 aa, Artificial Sequence
  source: /note="Description of Artificial Sequence: Synthetic peptide"
  MOD_RES (7)..(7): Citrulline
  MOD_RES (11)..(11): Citrulline
PTPDTYXGKYXEDHAD

SEQ ID NO: 5844 - protein, 16 aa, Artificial Sequence
  source: /note="Description of Artificial Sequence: Synthetic peptide"
  MOD_RES (7)..(7): Citrulline
  MOD_RES (16)..(16): Citrulline
PKPEDPXGVPLMAFPX

SEQ ID NO: 5845 - protein, 16 aa, Artificial Sequence
  source: /note="Description of Artificial Sequence: Synthetic peptide"
  MOD_RES (6)..(6): Citrulline
MDPETXGQEIIKVTPL

SEQ ID NO: 5846 - protein, 16 aa, Artificial Sequence
  source: /note="Description of Artificial Sequence: Synthetic peptide"
  MOD_RES (2)..(2): Citrulline
TXGQEIIKVTPLQQML

SEQ ID NO: 5847 - protein, 16 aa, Artificial Sequence
  source: /note="Description of Artificial Sequence: Synthetic peptide"
  MOD_RES (5)..(5): Citrulline
  MOD_RES (11)..(11): Citrulline
PALGXGAPAGXGHVFG

SEQ ID NO: 5848 - protein, 16 aa, Artificial Sequence
  source: /note="Description of Artificial Sequence: Synthetic peptide"
  MOD_RES (1)..(1): Citrulline
  MOD_RES (7)..(7): Citrulline
XGAPAGXGHVFGKPEE

SEQ ID NO: 5849 - protein, 16 aa, Artificial Sequence
  source: /note="Description of Artificial Sequence: Synthetic peptide"
  MOD_RES (3)..(3): Citrulline
AGXGHVFGKPEEPSTQ

SEQ ID NO: 5850 - protein, 16 aa, Artificial Sequence
  source: /note="Description of Artificial Sequence: Synthetic peptide"
  MOD_RES (6)..(6): Citrulline
  MOD_RES (10)..(10): Citrulline
SVGWSXTLGXGSSDAS

SEQ ID NO: 5851 - protein, 16 aa, Artificial Sequence
  source: /note="Description of Artificial Sequence: Synthetic peptide"
  MOD_RES (2)..(2): Citrulline
  MOD_RES (6)..(6): Citrulline
SXTLGXGSSDASLLPL

SEQ ID NO: 5852 - protein, 16 aa, Artificial Sequence
  source: /note="Description of Artificial Sequence: Synthetic peptide"
  MOD_RES (11)..(11): Citrulline
PCPSKSQMATXGLLDL

SEQ ID NO: 5853 - protein, 16 aa, Artificial Sequence
  source: /note="Description of Artificial Sequence: Synthetic peptide"
  MOD_RES (7)..(7): Citrulline
KSQMATXGLLDLDNPE

SEQ ID NO: 5854 - protein, 16 aa, Artificial Sequence
  source: /note="Description of Artificial Sequence: Synthetic peptide"
  MOD_RES (3)..(3): Citrulline
ATXGLLDLDNPELETE

SEQ ID NO: 5855 - protein, 16 aa, Artificial Sequence
  source: /note="Description of Artificial Sequence: Synthetic peptide"
  MOD_RES (9)..(9): Citrulline
KIGVAAVVXGAALMAP

SEQ ID NO: 5856 - protein, 16 aa, Artificial Sequence
  source: /note="Description of Artificial Sequence: Synthetic peptide"
  MOD_RES (5)..(5): Citrulline
AAVVXGAALMAPLPVF

SEQ ID NO: 5857 - protein, 16 aa, Artificial Sequence
  source: /note="Description of Artificial Sequence: Synthetic peptide"
  MOD_RES (10)..(10): Citrulline
TFESQMSVMXGQILNL

SEQ ID NO: 5858 - protein, 16 aa, Artificial Sequence
  source: /note="Description of Artificial Sequence: Synthetic peptide"
  MOD_RES (6)..(6): Citrulline
QMSVMXGQILNLTQAL

SEQ ID NO: 5859 - protein, 16 aa, Artificial Sequence
  source: /note="Description of Artificial Sequence: Synthetic peptide"
  MOD_RES (7)..(7): Citrulline
  MOD_RES (14)..(14): Citrulline
ALTAAPXGTWAQVXTS

SEQ ID NO: 5860 - protein, 16 aa, Artificial Sequence
  source: /note="Description of Artificial Sequence: Synthetic peptide"
  MOD_RES (3)..(3): Citrulline
  MOD_RES (10)..(10): Citrulline
APXGTWAQVXTSLKTQ

SEQ ID NO: 5861 - protein, 16 aa, Artificial Sequence
  source: /note="Description of Artificial Sequence: Synthetic peptide"
  MOD_RES (8)..(8): Citrulline
SSISLALXGAKILSEN

SEQ ID NO: 5862 - protein, 16 aa, Artificial Sequence
  source: /note="Description of Artificial Sequence: Synthetic peptide"
  MOD_RES (4)..(4): Citrulline
LALXGAKILSENVDCH

SEQ ID NO: 5863 - protein, 16 aa, Artificial Sequence
  source: /note="Description of Artificial Sequence: Synthetic peptide"
  MOD_RES (11)..(11): Citrulline
LPVHSTSYSNXGKPVI

SEQ ID NO: 5864 - protein, 16 aa, Artificial Sequence
  source: /note="Description of Artificial Sequence: Synthetic peptide"
  MOD_RES (9)..(9): Citrulline
AVVVKSVQXGSLAEVA

SEQ ID NO: 5865 - protein, 16 aa, Artificial Sequence
  source: /note="Description of Artificial Sequence: Synthetic peptide"
  MOD_RES (5)..(5): Citrulline
KSVQXGSLAEVAGLQV

SEQ ID NO: 5866 - protein, 16 aa, Artificial Sequence
  source: /note="Description of Artificial Sequence: Synthetic peptide"
  MOD_RES (9)..(9): Citrulline
  MOD_RES (11)..(11): Citrulline
GCILGEMLXGXPLFPG

SEQ ID NO: 5867 - protein, 16 aa, Artificial Sequence
  source: /note="Description of Artificial Sequence: Synthetic peptide"
  MOD_RES (5)..(5): Citrulline
  MOD_RES (7)..(7): Citrulline
GEMLXGXPLFPGTSTL

SEQ ID NO: 5868 - protein, 16 aa, Artificial Sequence
  source: /note="Description of Artificial Sequence: Synthetic peptide"
  MOD_RES (13)..(13): Citrulline
TLQDTQKQLEHTXGSL

SEQ ID NO: 5869 - protein, 16 aa, Artificial Sequence
  source: /note="Description of Artificial Sequence: Synthetic peptide"
  MOD_RES (9)..(9): Citrulline
TQKQLEHTXGSLSEQQ

SEQ ID NO: 5870 - protein, 16 aa, Artificial Sequence
  source: /note="Description of Artificial Sequence: Synthetic peptide"
  MOD_RES (5)..(5): Citrulline
LEHTXGSLSEQQEKVT

SEQ ID NO: 5871 - protein, 16 aa, Artificial Sequence
  source: /note="Description of Artificial Sequence: Synthetic peptide"
  MOD_RES (7)..(7): Citrulline
  MOD_RES (11)..(11): Citrulline
CNKLCGXGQSXQLSPE

SEQ ID NO: 5872 - protein, 13 aa, Artificial Sequence
  source: /note="Description of Artificial Sequence: Synthetic peptide"
  MOD_RES (3)..(3): Citrulline
  MOD_RES (7)..(7): Citrulline
CGXGQSXQLSPET

SEQ ID NO: 5873 - protein, 16 aa, Artificial Sequence
  source: /note="Description of Artificial Sequence: Synthetic peptide"
  MOD_RES (9)..(9): Citrulline
AIPKEPGLXGFLPENK

SEQ ID NO: 5874 - protein, 16 aa, Artificial Sequence
  source: /note="Description of Artificial Sequence: Synthetic peptide"
  MOD_RES (6)..(6): Citrulline
  MOD_RES (14)..(14): Citrulline
IVQLVXGKLSSGAXLT

SEQ ID NO: 5875 - protein, 16 aa, Artificial Sequence
  source: /note="Description of Artificial Sequence: Synthetic peptide"
  MOD_RES (11)..(12): Citrulline
YVCPVYKTSAXXGTLS

SEQ ID NO: 5876 - protein, 16 aa, Artificial Sequence
  source: /note="Description of Artificial Sequence: Synthetic peptide"
  MOD_RES (7)..(8): Citrulline
VYKTSAXXGTLSTTGH

SEQ ID NO: 5877 - protein, 16 aa, Artificial Sequence
  source: /note="Description of Artificial Sequence: Synthetic peptide"
  MOD_RES (3)..(4): Citrulline
SAXXGTLSTTGHSTNY

SEQ ID NO: 5878 - protein, 16 aa, Artificial Sequence
  source: /note="Description of Artificial Sequence: Synthetic peptide"
  MOD_RES (10)..(10): Citrulline
EGSGGAKPPXGASTGG

SEQ ID NO: 5879 - protein, 16 aa, Artificial Sequence
  source: /note="Description of Artificial Sequence: Synthetic peptide"
  MOD_RES (6)..(6): Citrulline
GAKPPXGASTGGSGGY

SEQ ID NO: 5880 - protein, 16 aa, Artificial Sequence
  source: /note="Description of Artificial Sequence: Synthetic peptide"
  MOD_RES (2)..(2): Citrulline
PXGASTGGSGGYGGSG

SEQ ID NO: 5881 - protein, 16 aa, Artificial Sequence
  source: /note="Description of Artificial Sequence: Synthetic peptide"
  MOD_RES (13)..(13): Citrulline
QSAMAICQHFYKXGNI

SEQ ID NO: 5882 - protein, 16 aa, Artificial Sequence
  source: /note="Description of Artificial Sequence: Synthetic peptide"
  MOD_RES (9)..(9): Citrulline
AICQHFYKXGNIYPGN

SEQ ID NO: 5883 - protein, 16 aa, Artificial Sequence
  source: /note="Description of Artificial Sequence: Synthetic peptide"
  MOD_RES (5)..(5): Citrulline
HFYKXGNIYPGNDTFD

SEQ ID NO: 5884 - protein, 16 aa, Artificial Sequence
  source: /note="Description of Artificial Sequence: Synthetic peptide"
  MOD_RES (13)..(13): Citrulline
NIWTVSEKFNMPXGYI

SEQ ID NO: 5885 - protein, 16 aa, Artificial Sequence
  source: /note="Description of Artificial Sequence: Synthetic peptide"
  MOD_RES (9)..(9): Citrulline
VSEKFNMPXGYIQNLL

SEQ ID NO: 5886 - protein, 16 aa, Artificial Sequence
  source: /note="Description of Artificial Sequence: Synthetic peptide"
  MOD_RES (5)..(5): Citrulline
FNMPXGYIQNLLTGTA

SEQ ID NO: 5887 - protein, 16 aa, Artificial Sequence
  source: /note="Description of Artificial Sequence: Synthetic peptide"
  MOD_RES (12)..(12): Citrulline
WQLDENAQKIQXGQIP

SEQ ID NO: 5888 - protein, 16 aa, Artificial Sequence
  source: /note="Description of Artificial Sequence: Synthetic peptide"
  MOD_RES (8)..(8): Citrulline
ENAQKIQXGQIPSKYV

SEQ ID NO: 5889 - protein, 16 aa, Artificial Sequence
  source: /note="Description of Artificial Sequence: Synthetic peptide"
  MOD_RES (4)..(4): Citrulline
KIQXGQIPSKYVMDQE

SEQ ID NO: 5890 - protein, 16 aa, Artificial Sequence
  source: /note="Description of Artificial Sequence: Synthetic peptide"
  MOD_RES (13)..(13): Citrulline
  MOD_RES (15)..(15): Citrulline
LGSGTPGSGSGSXGXL

SEQ ID NO: 5891 - protein, 16 aa, Artificial Sequence
  source: /note="Description of Artificial Sequence: Synthetic peptide"
  MOD_RES (9)..(9): Citrulline
  MOD_RES (11)..(11): Citrulline
TPGSGSGSXGXLNSFT

SEQ ID NO: 5892 - protein, 16 aa, Artificial Sequence
  source: /note="Description of Artificial Sequence: Synthetic peptide"
  MOD_RES (5)..(5): Citrulline
  MOD_RES (7)..(7): Citrulline
GSGSXGXLNSFTQGIL

SEQ ID NO: 5893 - protein, 16 aa, Artificial Sequence
  source: /note="Description of Artificial Sequence: Synthetic peptide"
  MOD_RES (13)..(13): Citrulline
GLETIPGPDAKVXGAL

SEQ ID NO: 5894 - protein, 16 aa, Artificial Sequence
  source: /note="Description of Artificial Sequence: Synthetic peptide"
  MOD_RES (9)..(9): Citrulline
IPGPDAKVXGALTWPS

SEQ ID NO: 5895 - protein, 16 aa, Artificial Sequence
  source: /note="Description of Artificial Sequence: Synthetic peptide"
  MOD_RES (5)..(5): Citrulline
DAKVXGALTWPSLAAA

SEQ ID NO: 5896 - protein, 16 aa, Artificial Sequence
  source: /note="Description of Artificial Sequence: Synthetic peptide"
  MOD_RES (13)..(13): Citrulline
QITGPTTVNGLEXGSL

SEQ ID NO: 5897 - protein, 16 aa, Artificial Sequence
  source: /note="Description of Artificial Sequence: Synthetic peptide"
  MOD_RES (9)..(9): Citrulline
PTTVNGLEXGSLTVQC

SEQ ID NO: 5898 - protein, 16 aa, Artificial Sequence
  source: /note="Description of Artificial Sequence: Synthetic peptide"
  MOD_RES (7)..(7): Citrulline
GDPNKTXGAPEALMAN

SEQ ID NO: 5899 - protein, 16 aa, Artificial Sequence
  source: /note="Description of Artificial Sequence: Synthetic peptide"
  MOD_RES (3)..(3): Citrulline
KTXGAPEALMANSGEP

SEQ ID NO: 5900 - protein, 16 aa, Artificial Sequence
  source: /note="Description of Artificial Sequence: Synthetic peptide"
  MOD_RES (8)..(8): Citrulline
  MOD_RES (12)..(12): Citrulline
GFLLSKFXSATXGEII

SEQ ID NO: 5901 - protein, 16 aa, Artificial Sequence
  source: /note="Description of Artificial Sequence: Synthetic peptide"
  MOD_RES (4)..(4): Citrulline
  MOD_RES (8)..(8): Citrulline
SKFXSATXGEIITPKT

SEQ ID NO: 5902 - protein, 16 aa, Artificial Sequence
  source: /note="Description of Artificial Sequence: Synthetic peptide"
  MOD_RES (8)..(8): Citrulline
LEILAVDXGMKLYGNN

SEQ ID NO: 5903 - protein, 16 aa, Artificial Sequence
  source: /note="Description of Artificial Sequence: Synthetic peptide"
  MOD_RES (4)..(4): Citrulline
AVDXGMKLYGNNGVSS

SEQ ID NO: 5904 - protein, 16 aa, Artificial Sequence
  source: /note="Description of Artificial Sequence: Synthetic peptide"
  MOD_RES (8)..(8): Citrulline
QLNGEFSXGKGLDVGA

SEQ ID NO: 5905 - protein, 16 aa, Artificial Sequence
  source: /note="Description of Artificial Sequence: Synthetic peptide"
  MOD_RES (4)..(4): Citrulline
  MOD_RES (13)..(13): Citrulline
EFSXGKGLDVGAXFWK

SEQ ID NO: 5906 - protein, 16 aa, Artificial Sequence
  source: /note="Description of Artificial Sequence: Synthetic peptide"
  MOD_RES (3)..(3): Citrulline
  MOD_RES (10)..(10): Citrulline
NFXIEKKIGXGQFSEV

SEQ ID NO: 5907 - protein, 16 aa, Artificial Sequence
  source: /note="Description of Artificial Sequence: Synthetic peptide"
  MOD_RES (6)..(6): Citrulline
  MOD_RES (14)..(14): Citrulline
EKKIGXGQFSEVYXAA

SEQ ID NO: 5908 - protein, 16 aa, Artificial Sequence
  source: /note="Description of Artificial Sequence: Synthetic peptide"
  MOD_RES (7)..(7): Citrulline
FCLLAAXGELLLPQET

SEQ ID NO: 5909 - protein, 16 aa, Artificial Sequence
  source: /note="Description of Artificial Sequence: Synthetic peptide"
  MOD_RES (3)..(3): Citrulline
AAXGELLLPQETTVEL

SEQ ID NO: 5910 - protein, 16 aa, Artificial Sequence
  source: /note="Description of Artificial Sequence: Synthetic peptide"
  MOD_RES (9)..(9): Citrulline
  MOD_RES (16)..(16): Citrulline
EALLSVAHXGSLASTX

SEQ ID NO: 5911 - protein, 16 aa, Artificial Sequence
  source: /note="Description of Artificial Sequence: Synthetic peptide"
  MOD_RES (5)..(5): Citrulline
  MOD_RES (12)..(12): Citrulline
SVAHXGSLASTXGQDV

SEQ ID NO: 5912 - protein, 16 aa, Artificial Sequence
  source: /note="Description of Artificial Sequence: Synthetic peptide"
  MOD_RES (10)..(10): Citrulline
  MOD_RES (13)..(13): Citrulline
KFVPEGFKVXEMXGKL

SEQ ID NO: 5913 - protein, 16 aa, Artificial Sequence
  source: /note="Description of Artificial Sequence: Synthetic peptide"
  MOD_RES (6)..(6): Citrulline
  MOD_RES (9)..(9): Citrulline
EGFKVXEMXGKLAIGI

SEQ ID NO: 5914 - protein, 16 aa, Artificial Sequence
  source: /note="Description of Artificial Sequence: Synthetic peptide"
  MOD_RES (8)..(8): Citrulline
AEKGGGPXGDAWKYST

SEQ ID NO: 5915 - protein, 16 aa, Artificial Sequence
  source: /note="Description of Artificial Sequence: Synthetic peptide"
  MOD_RES (4)..(4): Citrulline
GGPXGDAWKYSTDVKL

SEQ ID NO: 5916 - protein, 16 aa, Artificial Sequence
  source: /note="Description of Artificial Sequence: Synthetic peptide"
  MOD_RES (14)..(14): Citrulline
KTCHLVKGDFSHAXGT

SEQ ID NO: 5917 - protein, 16 aa, Artificial Sequence
  source: /note="Description of Artificial Sequence: Synthetic peptide"
  MOD_RES (10)..(10): Citrulline
LVKGDFSHAXGTALKD

SEQ ID NO: 5918 - protein, 16 aa, Artificial Sequence
  source: /note="Description of Artificial Sequence: Synthetic peptide"
  MOD_RES (6)..(6): Citrulline
DFSHAXGTALKDSGKG

SEQ ID NO: 5919 - protein, 16 aa, Artificial Sequence
  source: /note="Description of Artificial Sequence: Synthetic peptide"
  MOD_RES (8)..(8): Citrulline
  MOD_RES (10)..(10): Citrulline
GASSIDIXQXGYKGLI

SEQ ID NO: 5920 - protein, 16 aa, Artificial Sequence
  source: /note="Description of Artificial Sequence: Synthetic peptide"
  MOD_RES (4)..(4): Citrulline
  MOD_RES (6)..(6): Citrulline
IDIXQXGYKGLIGDDN

SEQ ID NO: 5921 - protein, 16 aa, Artificial Sequence
  source: /note="Description of Artificial Sequence: Synthetic peptide"
  MOD_RES (5)..(5): Citrulline
  MOD_RES (8)..(8): Citrulline
AESGXGKXYSYKLPQE

SEQ ID NO: 5922 - protein, 16 aa, Artificial Sequence
  source: /note="Description of Artificial Sequence: Synthetic peptide"
  MOD_RES (1)..(1): Citrulline
  MOD_RES (4)..(4): Citrulline
XGKXYSYKLPQEYNIE

SEQ ID NO: 5923 - protein, 16 aa, Artificial Sequence
  source: /note="Description of Artificial Sequence: Synthetic peptide"
  MOD_RES (5)..(5): Citrulline
  MOD_RES (12)..(12): Citrulline
QTLLXKGEKFGXGVIA

SEQ ID NO: 5924 - protein, 16 aa, Artificial Sequence
  source: /note="Description of Artificial Sequence: Synthetic peptide"
  MOD_RES (1)..(1): Citrulline
  MOD_RES (8)..(8): Citrulline
XKGEKFGXGVIAGLVD

SEQ ID NO: 5925 - protein, 16 aa, Artificial Sequence
  source: /note="Description of Artificial Sequence: Synthetic peptide"
  MOD_RES (12)..(12): Citrulline
NKTFTFGSFKTXGELL

SEQ ID NO: 5926 - protein, 16 aa, Artificial Sequence
  source: /note="Description of Artificial Sequence: Synthetic peptide"
  MOD_RES (8)..(8): Citrulline
  MOD_RES (14)..(14): Citrulline
TFGSFKTXGELLLXGD

SEQ ID NO: 5927 - protein, 16 aa, Artificial Sequence
  source: /note="Description of Artificial Sequence: Synthetic peptide"
  MOD_RES (4)..(4): Citrulline
  MOD_RES (10)..(10): Citrulline
FKTXGELLLXGDSTSE

SEQ ID NO: 5928 - protein, 16 aa, Artificial Sequence
  source: /note="Description of Artificial Sequence: Synthetic peptide"
  MOD_RES (6)..(6): Citrulline
SFAVLXGAVLGLQDGG

SEQ ID NO: 5929 - protein, 16 aa, Artificial Sequence
  source: /note="Description of Artificial Sequence: Synthetic peptide"
  MOD_RES (2)..(2): Citrulline
LXGAVLGLQDGGDNDD

SEQ ID NO: 5930 - protein, 16 aa, Artificial Sequence
  source: /note="Description of Artificial Sequence: Synthetic peptide"
  MOD_RES (11)..(11): Citrulline
PQWCAEFALAXGFQKG

SEQ ID NO: 5931 - protein, 16 aa, Artificial Sequence
  source: /note="Description of Artificial Sequence: Synthetic peptide"
  MOD_RES (7)..(7): Citrulline
AEFALAXGFQKGQVTV

SEQ ID NO: 5932 - protein, 16 aa, Artificial Sequence
  source: /note="Description of Artificial Sequence: Synthetic peptide"
  MOD_RES (3)..(3): Citrulline
LAXGFQKGQVTVTQPY

SEQ ID NO: 5933 - protein, 16 aa, Artificial Sequence
  source: /note="Description of Artificial Sequence: Synthetic peptide"
  MOD_RES (11)..(11): Citrulline
WAALCQAHKLXGELLE

SEQ ID NO: 5934 - protein, 16 aa, Artificial Sequence
  source: /note="Description of Artificial Sequence: Synthetic peptide"
  MOD_RES (7)..(7): Citrulline
  MOD_RES (16)..(16): Citrulline
CQAHKLXGELLELMQX

SEQ ID NO: 5935 - protein, 16 aa, Artificial Sequence
  source: /note="Description of Artificial Sequence: Synthetic peptide"
  MOD_RES (10)..(10): Citrulline
ILAWKVSLSXGSGYKE

SEQ ID NO: 5936 - protein, 13 aa, Artificial Sequence
  source: /note="Description of Artificial Sequence: Synthetic peptide"
  MOD_RES (6)..(6): Citrulline
KVSLSXGSGYKEI

SEQ ID NO: 5937 - protein, 16 aa, Artificial Sequence
  source: /note="Description of Artificial Sequence: Synthetic peptide"
  MOD_RES (11)..(11): Citrulline
  MOD_RES (14)..(14): Citrulline
DVFLSDPLLPXGQXVP

SEQ ID NO: 5938 - protein, 16 aa, Artificial Sequence
  source: /note="Description of Artificial Sequence: Synthetic peptide"
  MOD_RES (7)..(7): Citrulline
  MOD_RES (10)..(10): Citrulline
SDPLLPXGQXVPLYLS

SEQ ID NO: 5939 - protein, 16 aa, Artificial Sequence
  source: /note="Description of Artificial Sequence: Synthetic peptide"
  MOD_RES (6)..(6): Citrulline
  MOD_RES (9)..(9): Citrulline
HPFGAXVGXGAACGSA

SEQ ID NO: 5940 - protein, 16 aa, Artificial Sequence
  source: /note="Description of Artificial Sequence: Synthetic peptide"
  MOD_RES (2)..(2): Citrulline
  MOD_RES (5)..(5): Citrulline
AXVGXGAACGSATLGP

SEQ ID NO: 5941 - protein, 16 aa, Artificial Sequence
  source: /note="Description of Artificial Sequence: Synthetic peptide"
  MOD_RES (2)..(2): Citrulline
  MOD_RES (8)..(8): Citrulline
MXPTISIXGQKLKISD

SEQ ID NO: 5942 - protein, 16 aa, Artificial Sequence
  source: /note="Description of Artificial Sequence: Synthetic peptide"
  MOD_RES (4)..(4): Citrulline
ISIXGQKLKISDEMSK

SEQ ID NO: 5943 - protein, 16 aa, Artificial Sequence
  source: /note="Description of Artificial Sequence: Synthetic peptide"
  MOD_RES (8)..(8): Citrulline
  MOD_RES (11)..(11): Citrulline
AALGLGAXGVXGAVAL

SEQ ID NO: 5944 - protein, 16 aa, Artificial Sequence
  source: /note="Description of Artificial Sequence: Synthetic peptide"
  MOD_RES (4)..(4): Citrulline
  MOD_RES (7)..(7): Citrulline
LGAXGVXGAVALADFY

SEQ ID NO: 5945 - protein, 16 aa, Artificial Sequence
  source: /note="Description of Artificial Sequence: Synthetic peptide"
  MOD_RES (2)..(2): Citrulline
  MOD_RES (11)..(11): Citrulline
AXSTLDELLGXGMATK

SEQ ID NO: 5946 - protein, 16 aa, Artificial Sequence
  source: /note="Description of Artificial Sequence: Synthetic peptide"
  MOD_RES (7)..(7): Citrulline
  MOD_RES (16)..(16): Citrulline
LDELLGXGMATKLLAX

SEQ ID NO: 5947 - protein, 16 aa, Artificial Sequence
  source: /note="Description of Artificial Sequence: Synthetic peptide"
  MOD_RES (10)..(10): Citrulline
ALDTIPVFQXGGSVIP

SEQ ID NO: 5948 - protein, 16 aa, Artificial Sequence
  source: /note="Description of Artificial Sequence: Synthetic peptide"
  MOD_RES (10)..(10): Citrulline
SKAADSGLKXGDQIME

SEQ ID NO: 5949 - protein, 16 aa, Artificial Sequence
  source: /note="Description of Artificial Sequence: Synthetic peptide"
  MOD_RES (6)..(6): Citrulline
DSGLKXGDQIMEVNGQ

SEQ ID NO: 5950 - protein, 16 aa, Artificial Sequence
  source: /note="Description of Artificial Sequence: Synthetic peptide"
  MOD_RES (2)..(2): Citrulline
KXGDQIMEVNGQNFEN

SEQ ID NO: 5951 - protein, 16 aa, Artificial Sequence
  source: /note="Description of Artificial Sequence: Synthetic peptide"
  MOD_RES (8)..(8): Citrulline
  MOD_RES (10)..(10): Citrulline
LNLASVAXLXGTWEKL

SEQ ID NO: 5952 - protein, 16 aa, Artificial Sequence
  source: /note="Description of Artificial Sequence: Synthetic peptide"
  MOD_RES (4)..(4): Citrulline
  MOD_RES (6)..(6): Citrulline
SVAXLXGTWEKLPSKY

SEQ ID NO: 5953 - protein, 16 aa, Artificial Sequence
  source: /note="Description of Artificial Sequence: Synthetic peptide"
  MOD_RES (2)..(2): Citrulline
LXGTWEKLPSKYEKHL

SEQ ID NO: 5954 - protein, 16 aa, Artificial Sequence
  source: /note="Description of Artificial Sequence: Synthetic peptide"
  MOD_RES (8)..(8): Citrulline
  MOD_RES (16)..(16): Citrulline
YVKNILPXGAAIQDGX

SEQ ID NO: 5955 - protein, 16 aa, Artificial Sequence
  source: /note="Description of Artificial Sequence: Synthetic peptide"
  MOD_RES (4)..(4): Citrulline
  MOD_RES (12)..(12): Citrulline
ILPXGAAIQDGXLKAG

SEQ ID NO: 5956 - protein, 16 aa, Artificial Sequence
  source: /note="Description of Artificial Sequence: Synthetic peptide"
  MOD_RES (10)..(10): Citrulline
  MOD_RES (16)..(16): Citrulline
PVDYLPAAPXGLYKEX

SEQ ID NO: 5957 - protein, 16 aa, Artificial Sequence
  source: /note="Description of Artificial Sequence: Synthetic peptide"
  MOD_RES (6)..(6): Citrulline
  MOD_RES (12)..(12): Citrulline
LPAAPXGLYKEXELPY

SEQ ID NO: 5958 - protein, 16 aa, Artificial Sequence
  source: /note="Description of Artificial Sequence: Synthetic peptide"
  MOD_RES (4)..(4): Citrulline
  MOD_RES (6)..(6): Citrulline
DELXAXGLTGLKNIGN

SEQ ID NO: 5959 - protein, 16 aa, Artificial Sequence
  source: /note="Description of Artificial Sequence: Synthetic peptide"
  MOD_RES (2)..(2): Citrulline
AXGLTGLKNIGNTCYM

SEQ ID NO: 5960 - protein, 16 aa, Artificial Sequence
  source: /note="Description of Artificial Sequence: Synthetic peptide"
  MOD_RES (10)..(10): Citrulline
  MOD_RES (12)..(12): Citrulline
DWTGSYQIGXGXCKAL

SEQ ID NO: 5961 - protein, 16 aa, Artificial Sequence
  source: /note="Description of Artificial Sequence: Synthetic peptide"
  MOD_RES (6)..(6): Citrulline
  MOD_RES (8)..(8): Citrulline
SYQIGXGXCKALTGYE

SEQ ID NO: 5962 - protein, 16 aa, Artificial Sequence
  source: /note="Description of Artificial Sequence: Synthetic peptide"
  MOD_RES (2)..(2): Citrulline
  MOD_RES (4)..(4): Citrulline
GXGXCKALTGYEPGEK

SEQ ID NO: 5963 - protein, 16 aa, Artificial Sequence
  source: /note="Description of Artificial Sequence: Synthetic peptide"
  MOD_RES (7)..(7): Citrulline
  MOD_RES (10)..(10): Citrulline
VIHPSSXKTXGVPLSE

SEQ ID NO: 5964 - protein, 16 aa, Artificial Sequence
  source: /note="Description of Artificial Sequence: Synthetic peptide"
  MOD_RES (3)..(3): Citrulline
  MOD_RES (6)..(6): Citrulline
SSXKTXGVPLSEAGNV

SEQ ID NO: 5965 - protein, 16 aa, Artificial Sequence
  source: /note="Description of Artificial Sequence: Synthetic peptide"
  MOD_RES (9)..(9): Citrulline
KDVAVNFSXGEWKKLE

SEQ ID NO: 5966 - protein, 16 aa, Artificial Sequence
  source: /note="Description of Artificial Sequence: Synthetic peptide"
  MOD_RES (5)..(5): Citrulline
VNFSXGEWKKLEPFQK

SEQ ID NO: 5967 - protein, 16 aa, Artificial Sequence
  source: /note="Description of Artificial Sequence: Synthetic peptide"
  MOD_RES (4)..(4): Citrulline
  MOD_RES (14)..(14): Citrulline
GQAXGEHTVHVGPXGS

SEQ ID NO: 5968 - protein, 16 aa, Artificial Sequence
  source: /note="Description of Artificial Sequence: Synthetic peptide"
  MOD_RES (10)..(10): Citrulline
  MOD_RES (14)..(14): Citrulline
GEHTVHVGPXGSVXLL

SEQ ID NO: 5969 - protein, 16 aa, Artificial Sequence
  source: /note="Description of Artificial Sequence: Synthetic peptide"
  MOD_RES (6)..(6): Citrulline
  MOD_RES (10)..(10): Citrulline
VHVGPXGSVXLLAEYE

SEQ ID NO: 5970 - protein, 16 aa, Artificial Sequence
  source: /note="Description of Artificial Sequence: Synthetic peptide"
  MOD_RES (6)..(6): Citrulline
  MOD_RES (10)..(10): Citrulline
LYKHMXIHKXGKPYQS

SEQ ID NO: 5971 - protein, 16 aa, Artificial Sequence
  source: /note="Description of Artificial Sequence: Synthetic peptide"
  MOD_RES (2)..(2): Citrulline
  MOD_RES (6)..(6): Citrulline
MXIHKXGKPYQSSNYS

SEQ ID NO: 5972 - protein, 16 aa, Artificial Sequence
  source: /note="Description of Artificial Sequence: Synthetic peptide"
  MOD_RES (10)..(10): Citrulline
  MOD_RES (13)..(13): Citrulline
KKESKEEYAXSTXGCL

SEQ ID NO: 5973 - protein, 16 aa, Artificial Sequence
  source: /note="Description of Artificial Sequence: Synthetic peptide"
  MOD_RES (6)..(6): Citrulline
  MOD_RES (9)..(9): Citrulline
KEEYAXSTXGCLEAGL

SEQ ID NO: 5974 - protein, 16 aa, Artificial Sequence
  source: /note="Description of Artificial Sequence: Synthetic peptide"
  MOD_RES (2)..(2): Citrulline
  MOD_RES (11)..(11): Citrulline
LXEGAVQFLHXGLCNS

SEQ ID NO: 5975 - protein, 16 aa, Artificial Sequence
  source: /note="Description of Artificial Sequence: Synthetic peptide"
  MOD_RES (7)..(7): Citrulline
AVQFLHXGLCNSNLSS

SEQ ID NO: 5976 - protein, 16 aa, Artificial Sequence
  source: /note="Description of Artificial Sequence: Synthetic peptide"
  MOD_RES (2)..(2): Citrulline
  MOD_RES (12)..(12): Citrulline
EXSGSMDNTSAXGGLL

SEQ ID NO: 5977 - protein, 16 aa, Artificial Sequence
  source: /note="Description of Artificial Sequence: Synthetic peptide"
  MOD_RES (8)..(8): Citrulline
  MOD_RES (16)..(16): Citrulline
SMDNTSAXGGLLEGMX

SEQ ID NO: 5978 - protein, 16 aa, Artificial Sequence
  source: /note="Description of Artificial Sequence: Synthetic peptide"
  MOD_RES (4)..(4): Citrulline
  MOD_RES (12)..(12): Citrulline
TSAXGGLLEGMXQADI

SEQ ID NO: 5979 - protein, 16 aa, Artificial Sequence
  source: /note="Description of Artificial Sequence: Synthetic peptide"
  MOD_RES (1)..(1): Citrulline
  MOD_RES (13)..(13): Citrulline
XGDLLSGANGGTXGTQ

SEQ ID NO: 5980 - protein, 16 aa, Artificial Sequence
  source: /note="Description of Artificial Sequence: Synthetic peptide"
  MOD_RES (9)..(9): Citrulline
  MOD_RES (13)..(13): Citrulline
LSGANGGTXGTQXGDE

SEQ ID NO: 5981 - protein, 16 aa, Artificial Sequence
  source: /note="Description of Artificial Sequence: Synthetic peptide"
  MOD_RES (9)..(9): Citrulline
  MOD_RES (15)..(15): Citrulline
SKVDDHLIXGTEKSXL

SEQ ID NO: 5982 - protein, 16 aa, Artificial Sequence
  source: /note="Description of Artificial Sequence: Synthetic peptide"
  MOD_RES (5)..(5): Citrulline
  MOD_RES (11)..(11): Citrulline
DHLIXGTEKSXLEPAT

SEQ ID NO: 5983 - protein, 16 aa, Artificial Sequence
  source: /note="Description of Artificial Sequence: Synthetic peptide"
  MOD_RES (5)..(5): Citrulline
  MOD_RES (15)..(15): Citrulline
VHGAXGLQLSVAAPXT

SEQ ID NO: 5984 - protein, 16 aa, Artificial Sequence
  source: /note="Description of Artificial Sequence: Synthetic peptide"
  MOD_RES (1)..(1): Citrulline
  MOD_RES (14)..(14): Citrulline
XYSSSSIPEPFGSXGS

SEQ ID NO: 5985 - protein, 16 aa, Artificial Sequence
  source: /note="Description of Artificial Sequence: Synthetic peptide"
  MOD_RES (10)..(10): Citrulline
  MOD_RES (14)..(14): Citrulline
SSIPEPFGSXGSPXKA

SEQ ID NO: 5986 - protein, 16 aa, Artificial Sequence
  source: /note="Description of Artificial Sequence: Synthetic peptide"
  MOD_RES (6)..(6): Citrulline
  MOD_RES (10)..(10): Citrulline
EPFGSXGSPXKAATDG

SEQ ID NO: 5987 - protein, 16 aa, Artificial Sequence
  source: /note="Description of Artificial Sequence: Synthetic peptide"
  MOD_RES (8)..(8): Citrulline
  MOD_RES (13)..(13): Citrulline
TPFDFLGXAGSPXGSP

SEQ ID NO: 5988 - protein, 16 aa, Artificial Sequence
  source: /note="Description of Artificial Sequence: Synthetic peptide"
  MOD_RES (4)..(4): Citrulline
  MOD_RES (9)..(9): Citrulline
FLGXAGSPXGSPLAEG

SEQ ID NO: 5989 - protein, 16 aa, Artificial Sequence
  source: /note="Description of Artificial Sequence: Synthetic peptide"
  MOD_RES (5)..(5): Citrulline
AGSPXGSPLAEGPQAF

SEQ ID NO: 5990 - protein, 16 aa, Artificial Sequence
  source: /note="Description of Artificial Sequence: Synthetic peptide"
  MOD_RES (1)..(1): Citrulline
  MOD_RES (16)..(16): Citrulline
XGSPLAEGPQAFFPEX

SEQ ID NO: 5991 - protein, 16 aa, Artificial Sequence
  source: /note="Description of Artificial Sequence: Synthetic peptide"
  MOD_RES (11)..(11): Citrulline
  MOD_RES (14)..(14): Citrulline
PPCNAEWSSAXGSXLW

SEQ ID NO: 5992 - protein, 16 aa, Artificial Sequence
  source: /note="Description of Artificial Sequence: Synthetic peptide"
  MOD_RES (7)..(7): Citrulline
  MOD_RES (10)..(10): Citrulline
AEWSSAXGSXLWCSQK

SEQ ID NO: 5993 - protein, 16 aa, Artificial Sequence
  source: /note="Description of Artificial Sequence: Synthetic peptide"
  MOD_RES (3)..(3): Citrulline
  MOD_RES (6)..(6): Citrulline
SAXGSXLWCSQKSGGV

SEQ ID NO: 5994 - protein, 16 aa, Artificial Sequence
  source: /note="Description of Artificial Sequence: Synthetic peptide"
  MOD_RES (1)..(1): Citrulline
  MOD_RES (12)..(12): Citrulline
XTLPIGQNFPIXGIQL

SEQ ID NO: 5995 - protein, 16 aa, Artificial Sequence
  source: /note="Description of Artificial Sequence: Synthetic peptide"
  MOD_RES (3)..(3): Citrulline
  MOD_RES (10)..(10): Citrulline
FGXLGSFPVXGTPMAT

SEQ ID NO: 5996 - protein, 16 aa, Artificial Sequence
  source: /note="Description of Artificial Sequence: Synthetic peptide"
  MOD_RES (6)..(6): Citrulline
  MOD_RES (13)..(13): Citrulline
GSFPVXGTPMATXLLL

SEQ ID NO: 5997 - protein, 16 aa, Artificial Sequence
  source: /note="Description of Artificial Sequence: Synthetic peptide"
  MOD_RES (8)..(8): Citrulline
LCHHCTGXGGAGSGGA

SEQ ID NO: 5998 - protein, 16 aa, Artificial Sequence
  source: /note="Description of Artificial Sequence: Synthetic peptide"
  MOD_RES (4)..(4): Citrulline
CTGXGGAGSGGAGSGA

SEQ ID NO: 5999 - protein, 16 aa, Artificial Sequence
  source: /note="Description of Artificial Sequence: Synthetic peptide"
  MOD_RES (9)..(9): Citrulline
NGLVDPKTXGKVYEKV

SEQ ID NO: 6000 - protein, 16 aa, Artificial Sequence
  source: /note="Description of Artificial Sequence: Synthetic peptide"
  MOD_RES (5)..(5): Citrulline
DPKTXGKVYEKVDSWN

SEQ ID NO: 6001 - protein, 16 aa, Artificial Sequence
  source: /note="Description of Artificial Sequence: Synthetic peptide"
  MOD_RES (7)..(7): Citrulline
  MOD_RES (12)..(12): Citrulline
SVAFSSXLGGSXGAPG

SEQ ID NO: 6002 - protein, 16 aa, Artificial Sequence
  source: /note="Description of Artificial Sequence: Synthetic peptide"
  MOD_RES (3)..(3): Citrulline
  MOD_RES (8)..(8): Citrulline
SSXLGGSXGAPGLLMA

SEQ ID NO: 6003 - protein, 16 aa, Artificial Sequence
  source: /note="Description of Artificial Sequence: Synthetic peptide"
  MOD_RES (2)..(2): Citrulline
  MOD_RES (12)..(12): Citrulline
TXPVHPALPFAXGEYI

SEQ ID NO: 6004 - protein, 16 aa, Artificial Sequence
  source: /note="Description of Artificial Sequence: Synthetic peptide"
  MOD_RES (8)..(8): Citrulline
  MOD_RES (15)..(15): Citrulline
HPALPFAXGEYIDNXS

SEQ ID NO: 6005 - protein, 16 aa, Artificial Sequence
  source: /note="Description of Artificial Sequence: Synthetic peptide"
  MOD_RES (2)..(2): Citrulline
  MOD_RES (11)..(11): Citrulline
EXQDSLASAKXGSVVG

SEQ ID NO: 6006 - protein, 16 aa, Artificial Sequence
  source: /note="Description of Artificial Sequence: Synthetic peptide"
  MOD_RES (7)..(7): Citrulline
  MOD_RES (13)..(13): Citrulline
SLASAKXGSVVGXNLN

SEQ ID NO: 6007 - protein, 16 aa, Artificial Sequence
  source: /note="Description of Artificial Sequence: Synthetic peptide"
  MOD_RES (9)..(9): Citrulline
  MOD_RES (14)..(14): Citrulline
AEAHPPVGXGTGKXVL

SEQ ID NO: 6008 - protein, 16 aa, Artificial Sequence
  source: /note="Description of Artificial Sequence: Synthetic peptide"
  MOD_RES (5)..(5): Citrulline
  MOD_RES (10)..(10): Citrulline
PPVGXGTGKXVLTAKE

SEQ ID NO: 6009 - protein, 16 aa, Artificial Sequence
  source: /note="Description of Artificial Sequence: Synthetic peptide"
  MOD_RES (7)..(7): Citrulline
KLGLLLXGDQLGGEEL

SEQ ID NO: 6010 - protein, 16 aa, Artificial Sequence
  source: /note="Description of Artificial Sequence: Synthetic peptide"
  MOD_RES (3)..(3): Citrulline
  MOD_RES (16)..(16): Citrulline
LLXGDQLGGEELALLX

SEQ ID NO: 6011 - protein, 16 aa, Artificial Sequence
  source: /note="Description of Artificial Sequence: Synthetic peptide"
  MOD_RES (13)..(13): Citrulline
GSGTGGGPGLGSXGAW

SEQ ID NO: 6012 - protein, 16 aa, Artificial Sequence
  source: /note="Description of Artificial Sequence: Synthetic peptide"
  MOD_RES (9)..(9): Citrulline
GGGPGLGSXGAWAELA

SEQ ID NO: 6013 - protein, 16 aa, Artificial Sequence
  source: /note="Description of Artificial Sequence: Synthetic peptide"
  MOD_RES (11)..(12): Citrulline
YEYYPHVYPGXXGSMV

SEQ ID NO: 6014 - protein, 16 aa, Artificial Sequence
  source: /note="Description of Artificial Sequence: Synthetic peptide"
  MOD_RES (7)..(8): Citrulline
PHVYPGXXGSMVPFSM

SEQ ID NO: 6015 - protein, 16 aa, Artificial Sequence
  source: /note="Description of Artificial Sequence: Synthetic peptide"
  MOD_RES (5)..(5): Citrulline
LCKGXGMQIHIQQIGP

SEQ ID NO: 6016 - protein, 16 aa, Artificial Sequence
  source: /note="Description of Artificial Sequence: Synthetic peptide"
  MOD_RES (9)..(9): Citrulline
  MOD_RES (13)..(13): Citrulline
CGHSGHWAXGCPXGGA

SEQ ID NO: 6017 - protein, 16 aa, Artificial Sequence
  source: /note="Description of Artificial Sequence: Synthetic peptide"
  MOD_RES (11)..(11): Citrulline
GFLIDTSQGVXGQINF

SEQ ID NO: 6018 - protein, 16 aa, Artificial Sequence
  source: /note="Description of Artificial Sequence: Synthetic peptide"
  MOD_RES (7)..(7): Citrulline
DTSQGVXGQINFSTQE

SEQ ID NO: 6019 - protein, 16 aa, Artificial Sequence
  source: /note="Description of Artificial Sequence: Synthetic peptide"
  MOD_RES (3)..(3): Citrulline
GVXGQINFSTQETGFY

SEQ ID NO: 6020 - protein, 16 aa, Artificial Sequence
  source: /note="Description of Artificial Sequence: Synthetic peptide"
  MOD_RES (3)..(3): Citrulline
  MOD_RES (10)..(10): Citrulline
TPXPFGSQTXGISSLP

SEQ ID NO: 6021 - protein, 16 aa, Artificial Sequence
  source: /note="Description of Artificial Sequence: Synthetic peptide"
  MOD_RES (6)..(6): Citrulline
  MOD_RES (13)..(13): Citrulline
FGSQTXGISSLPXSYT

SEQ ID NO: 6022 - protein, 16 aa, Artificial Sequence
  source: /note="Description of Artificial Sequence: Synthetic peptide"
  MOD_RES (2)..(2): Citrulline
  MOD_RES (9)..(9): Citrulline
TXGISSLPXSYTMDDA

SEQ ID NO: 6023 - protein, 16 aa, Artificial Sequence
  source: /note="Description of Artificial Sequence: Synthetic peptide"
  MOD_RES (8)..(8): Citrulline
AAAIGSAXGQSTGKGP

SEQ ID NO: 6024 - protein, 16 aa, Artificial Sequence
  source: /note="Description of Artificial Sequence: Synthetic peptide"
  MOD_RES (4)..(4): Citrulline
GSAXGQSTGKGPPQSP

SEQ ID NO: 6025 - protein, 16 aa, Artificial Sequence
  source: /note="Description of Artificial Sequence: Synthetic peptide"
  MOD_RES (10)..(10): Citrulline
PPSKSSPQAXGSLEEQ

SEQ ID NO: 6026 - protein, 16 aa, Artificial Sequence
  source: /note="Description of Artificial Sequence: Synthetic peptide"
  MOD_RES (6)..(6): Citrulline
SSPQAXGSLEEQLLQE

SEQ ID NO: 6027 - protein, 16 aa, Artificial Sequence
  source: /note="Description of Artificial Sequence: Synthetic peptide"
  MOD_RES (9)..(9): Citrulline
  MOD_RES (12)..(12): Citrulline
EAVISNTSXLSXGSIS

SEQ ID NO: 6028 - protein, 16 aa, Artificial Sequence
  source: /note="Description of Artificial Sequence: Synthetic peptide"
  MOD_RES (5)..(5): Citrulline
  MOD_RES (8)..(8): Citrulline
SNTSXLSXGSISSTSE

SEQ ID NO: 6029 - protein, 16 aa, Artificial Sequence
  source: /note="Description of Artificial Sequence: Synthetic peptide"
  MOD_RES (5)..(5): Citrulline
  MOD_RES (11)..(11): Citrulline
FQNLXNPAKSXGGPGP

SEQ ID NO: 6030 - protein, 16 aa, Artificial Sequence
  source: /note="Description of Artificial Sequence: Synthetic peptide"
  MOD_RES (1)..(1): Citrulline
  MOD_RES (7)..(7): Citrulline
XNPAKSXGGPGPDYYL

SEQ ID NO: 6031 - protein, 16 aa, Artificial Sequence
  source: /note="Description of Artificial Sequence: Synthetic peptide"
  MOD_RES (3)..(3): Citrulline
KSXGGPGPDYYLKNYE

SEQ ID NO: 6032 - protein, 16 aa, Artificial Sequence
  source: /note="Description of Artificial Sequence: Synthetic peptide"
  MOD_RES (6)..(6): Citrulline
TDLSIXGTLFVPQNSG

SEQ ID NO: 6033 - protein, 16 aa, Artificial Sequence
  source: /note="Description of Artificial Sequence: Synthetic peptide"
  MOD_RES (2)..(2): Citrulline
IXGTLFVPQNSGLGEN

SEQ ID NO: 6034 - protein, 16 aa, Artificial Sequence
  source: /note="Description of Artificial Sequence: Synthetic peptide"
  MOD_RES (11)..(11): Citrulline
ILQATVKNKEXGTLLT

SEQ ID NO: 6035 - protein, 16 aa, Artificial Sequence
  source: /note="Description of Artificial Sequence: Synthetic peptide"
  MOD_RES (7)..(7): Citrulline
TVKNKEXGTLLTTHYM

SEQ ID NO: 6036 - protein, 16 aa, Artificial Sequence
  source: /note="Description of Artificial Sequence: Synthetic peptide"
  MOD_RES (3)..(3): Citrulline
KEXGTLLTTHYMSEAE

SEQ ID NO: 6037 - protein, 16 aa, Artificial Sequence
  source: /note="Description of Artificial Sequence: Synthetic peptide"
  MOD_RES (8)..(8): Citrulline
  MOD_RES (10)..(10): Citrulline
SQESIGAXSXGSGHSQ

SEQ ID NO: 6038 - protein, 16 aa, Artificial Sequence
  source: /note="Description of Artificial Sequence: Synthetic peptide"
  MOD_RES (4)..(4): Citrulline
  MOD_RES (6)..(6): Citrulline
IGAXSXGSGHSQEQPA

SEQ ID NO: 6039 - protein, 16 aa, Artificial Sequence
  source: /note="Description of Artificial Sequence: Synthetic peptide"
  MOD_RES (11)..(11): Citrulline
  MOD_RES (15)..(15): Citrulline
TSPSVTPTPAXGTPXS

SEQ ID NO: 6040 - protein, 16 aa, Artificial Sequence
  source: /note="Description of Artificial Sequence: Synthetic peptide"
  MOD_RES (7)..(7): Citrulline
  MOD_RES (11)..(11): Citrulline
VTPTPAXGTPXSQSFA

SEQ ID NO: 6041 - protein, 16 aa, Artificial Sequence
  source: /note="Description of Artificial Sequence: Synthetic peptide"
  MOD_RES (9)..(9): Citrulline
  MOD_RES (11)..(11): Citrulline
GTGHPPSKXAXGFSAA

SEQ ID NO: 6042 - protein, 16 aa, Artificial Sequence
  source: /note="Description of Artificial Sequence: Synthetic peptide"
  MOD_RES (5)..(5): Citrulline
  MOD_RES (7)..(7): Citrulline
PPSKXAXGFSAAAAPD

SEQ ID NO: 6043 - protein, 16 aa, Artificial Sequence
  source: /note="Description of Artificial Sequence: Synthetic peptide"
  MOD_RES (8)..(8): Citrulline
DSKPHSLXGDSIKQEE

SEQ ID NO: 6044 - protein, 16 aa, Artificial Sequence
  source: /note="Description of Artificial Sequence: Synthetic peptide"
  MOD_RES (4)..(4): Citrulline
HSLXGDSIKQEEAQKS

SEQ ID NO: 6045 - protein, 16 aa, Artificial Sequence
  source: /note="Description of Artificial Sequence: Synthetic peptide"
  MOD_RES (11)..(11): Citrulline
PVSGGPGGFGXGSQGG

SEQ ID NO: 6046 - protein, 16 aa, Artificial Sequence
  source: /note="Description of Artificial Sequence: Synthetic peptide"
  MOD_RES (7)..(7): Citrulline
GPGGFGXGSQGGNFEG

SEQ ID NO: 6047 - protein, 16 aa, Artificial Sequence
  source: /note="Description of Artificial Sequence: Synthetic peptide"
  MOD_RES (3)..(3): Citrulline
  MOD_RES (16)..(16): Citrulline
FGXGSQGGNFEGPNKX

SEQ ID NO: 6048 - protein, 16 aa, Artificial Sequence
  source: /note="Description of Artificial Sequence: Synthetic peptide"
  MOD_RES (10)..(10): Citrulline
  MOD_RES (12)..(12): Citrulline
LTKSPQAFYXGXPSWQ

SEQ ID NO: 6049 - protein, 16 aa, Artificial Sequence
  source: /note="Description of Artificial Sequence: Synthetic peptide"
  MOD_RES (6)..(6): Citrulline
  MOD_RES (8)..(8): Citrulline
PQAFYXGXPSWQGTPG

SEQ ID NO: 6050 - protein, 16 aa, Artificial Sequence
  source: /note="Description of Artificial Sequence: Synthetic peptide"
  MOD_RES (11)..(11): Citrulline
  MOD_RES (14)..(14): Citrulline
PSWQGTPGVLXGSXDV

SEQ ID NO: 6051 - protein, 16 aa, Artificial Sequence
  source: /note="Description of Artificial Sequence: Synthetic peptide"
  MOD_RES (7)..(7): Citrulline
  MOD_RES (10)..(10): Citrulline
GTPGVLXGSXDVLAGL

SEQ ID NO: 6052 - protein, 16 aa, Artificial Sequence
  source: /note="Description of Artificial Sequence: Synthetic peptide"
  MOD_RES (10)..(10): Citrulline
GFDEKMFLKXGGKYIW

SEQ ID NO: 6053 - protein, 16 aa, Artificial Sequence
  source: /note="Description of Artificial Sequence: Synthetic peptide"
  MOD_RES (6)..(6): Citrulline
KMFLKXGGKYIWSKAD

SEQ ID NO: 6054 - protein, 16 aa, Artificial Sequence
  source: /note="Description of Artificial Sequence: Synthetic peptide"
  MOD_RES (9)..(9): Citrulline
GKDPGLAGXGDPKAMA

SEQ ID NO: 6055 - protein, 16 aa, Artificial Sequence
  source: /note="Description of Artificial Sequence: Synthetic peptide"
  MOD_RES (5)..(5): Citrulline
  MOD_RES (15)..(15): Citrulline
GLAGXGDPKAMAQLXV

SEQ ID NO: 6056 - protein, 16 aa, Artificial Sequence
  source: /note="Description of Artificial Sequence: Synthetic peptide"
  MOD_RES (11)..(11): Citrulline
GEGSVHLASSXGTLSD

SEQ ID NO: 6057 - protein, 16 aa, Artificial Sequence
  source: /note="Description of Artificial Sequence: Synthetic peptide"
  MOD_RES (8)..(8): Citrulline
  MOD_RES (10)..(10): Citrulline
SVELHIIXSXGSLVKQ

SEQ ID NO: 6058 - protein, 16 aa, Artificial Sequence
  source: /note="Description of Artificial Sequence: Synthetic peptide"
  MOD_RES (11)..(11): Citrulline
EFYLDGNAMPXGIKSL

SEQ ID NO: 6059 - protein, 16 aa, Artificial Sequence
  source: /note="Description of Artificial Sequence: Synthetic peptide"
  MOD_RES (7)..(7): Citrulline
DGNAMPXGIKSLKGEA

SEQ ID NO: 6060 - protein, 16 aa, Artificial Sequence
  source: /note="Description of Artificial Sequence: Synthetic peptide"
  MOD_RES (10)..(10): Citrulline
  MOD_RES (14)..(14): Citrulline
VKGSASIIIXGDKXAS

SEQ ID NO: 6061 - protein, 16 aa, Artificial Sequence
  source: /note="Description of Artificial Sequence: Synthetic peptide"
  MOD_RES (6)..(6): Citrulline
  MOD_RES (10)..(10): Citrulline
ASIIIXGDKXASGEVG

SEQ ID NO: 6062 - protein, 16 aa, Artificial Sequence
  source: /note="Description of Artificial Sequence: Synthetic peptide"
  MOD_RES (2)..(2): Citrulline
  MOD_RES (6)..(6): Citrulline
IXGDKXASGEVGIAPS

SEQ ID NO: 6063 - protein, 16 aa, Artificial Sequence
  source: /note="Description of Artificial Sequence: Synthetic peptide"
  MOD_RES (9)..(9): Citrulline
  MOD_RES (11)..(11): Citrulline
WKAYDDVFXGXTNAAE

SEQ ID NO: 6064 - protein, 16 aa, Artificial Sequence
  source: /note="Description of Artificial Sequence: Synthetic peptide"
  MOD_RES (9)..(9): Citrulline
  MOD_RES (13)..(13): Citrulline
AQGAVDSWXGGLXQSL

SEQ ID NO: 6065 - protein, 16 aa, Artificial Sequence
  source: /note="Description of Artificial Sequence: Synthetic peptide"
  MOD_RES (5)..(5): Citrulline
  MOD_RES (9)..(9): Citrulline
VDSWXGGLXQSLMQCQ

SEQ ID NO: 6066 - protein, 16 aa, Artificial Sequence
  source: /note="Description of Artificial Sequence: Synthetic peptide"
  MOD_RES (14)..(14): Citrulline
VPTGISMTGGSSTXGS

SEQ ID NO: 6067 - protein, 16 aa, Artificial Sequence
  source: /note="Description of Artificial Sequence: Synthetic peptide"
  MOD_RES (10)..(10): Citrulline
ISMTGGSSTXGSQGTT

SEQ ID NO: 6068 - protein, 15 aa, Artificial Sequence
  source: /note="Description of Artificial Sequence: Synthetic peptide"
  MOD_RES (6)..(6): Citrulline
GGSSTXGSQGTTHLL

SEQ ID NO: 6069 - protein, 16 aa, Artificial Sequence
  source: /note="Description of Artificial Sequence: Synthetic peptide"
  MOD_RES (4)..(4): Citrulline
  MOD_RES (11)..(11): Citrulline
EVSXTEVISSXGTSMS

SEQ ID NO: 6070 - protein, 16 aa, Artificial Sequence
  source: /note="Description of Artificial Sequence: Synthetic peptide"
  MOD_RES (7)..(7): Citrulline
TEVISSXGTSMSGPDQ

SEQ ID NO: 6071 - protein, 16 aa, Artificial Sequence
  source: /note="Description of Artificial Sequence: Synthetic peptide"
  MOD_RES (3)..(3): Citrulline
SSXGTSMSGPDQFTIS

SEQ ID NO: 6072 - protein, 16 aa, Artificial Sequence
  source: /note="Description of Artificial Sequence: Synthetic peptide"
  MOD_RES (13)..(13): Citrulline
ITTQTGSPGATSXGTL

SEQ ID NO: 6073 - protein, 16 aa, Artificial Sequence
  source: /note="Description of Artificial Sequence: Synthetic peptide"
  MOD_RES (9)..(9): Citrulline
TGSPGATSXGTLTLDT

SEQ ID NO: 6074 - protein, 16 aa, Artificial Sequence
  source: /note="Description of Artificial Sequence: Synthetic peptide"
  MOD_RES (9)..(9): Citrulline
  MOD_RES (13)..(13): Citrulline
KIPNEAAHXGTIXPVK

SEQ ID NO: 6075 - protein, 16 aa, Artificial Sequence
  source: /note="Description of Artificial Sequence: Synthetic peptide"
  MOD_RES (5)..(5): Citrulline
  MOD_RES (9)..(9): Citrulline
EAAHXGTIXPVKGPQT

SEQ ID NO: 6076 - protein, 16 aa, Artificial Sequence
  source: /note="Description of Artificial Sequence: Synthetic peptide"
  MOD_RES (12)..(12): Citrulline
TVSGTIPNFSHXGSDT

SEQ ID NO: 6077 - protein, 16 aa, Artificial Sequence
  source: /note="Description of Artificial Sequence: Synthetic peptide"
  MOD_RES (8)..(8): Citrulline
TIPNFSHXGSDTAPSM

SEQ ID NO: 6078 - protein, 16 aa, Artificial Sequence
  source: /note="Description of Artificial Sequence: Synthetic peptide"
  MOD_RES (4)..(4): Citrulline
FSHXGSDTAPSMVTSP

SEQ ID NO: 6079 - protein, 16 aa, Artificial Sequence
  source: /note="Description of Artificial Sequence: Synthetic peptide"
  MOD_RES (1)..(1): Citrulline
  MOD_RES (12)..(12): Citrulline
XQAPQPQSSLQXGIPT

SEQ ID NO: 6080 - protein, 16 aa, Artificial Sequence
  source: /note="Description of Artificial Sequence: Synthetic peptide"
  MOD_RES (8)..(8): Citrulline
  MOD_RES (15)..(15): Citrulline
QPQSSLQXGIPTSAXS

SEQ ID NO: 6081 - protein, 16 aa, Artificial Sequence
  source: /note="Description of Artificial Sequence: Synthetic peptide"
  MOD_RES (12)..(12): Citrulline
GCGVGGQPLGGXGQWV

SEQ ID NO: 6082 - protein, 16 aa, Artificial Sequence
  source: /note="Description of Artificial Sequence: Synthetic peptide"
  MOD_RES (8)..(8): Citrulline
GGQPLGGXGQWVGEET

SEQ ID NO: 6083 - protein, 16 aa, Artificial Sequence
  source: /note="Description of Artificial Sequence: Synthetic peptide"
  MOD_RES (4)..(4): Citrulline
LGGXGQWVGEETGPVG

SEQ ID NO: 6084 - protein, 16 aa, Artificial Sequence
  source: /note="Description of Artificial Sequence: Synthetic peptide"
  MOD_RES (5)..(5): Citrulline
  MOD_RES (15)..(15): Citrulline
GACSXSCGKLGVQTXG

SEQ ID NO: 6085 - protein, 16 aa, Artificial Sequence
  source: /note="Description of Artificial Sequence: Synthetic peptide"
  MOD_RES (1)..(1): Citrulline
  MOD_RES (11)..(11): Citrulline
XSCGKLGVQTXGIQCL

SEQ ID NO: 6086 - protein, 16 aa, Artificial Sequence
  source: /note="Description of Artificial Sequence: Synthetic peptide"
  MOD_RES (7)..(7): Citrulline
IKTQTMXGSPFIKPYE

SEQ ID NO: 6087 - protein, 16 aa, Artificial Sequence
  source: /note="Description of Artificial Sequence: Synthetic peptide"
  MOD_RES (13)..(13): Citrulline
VELIEIISTAKAXGQV

SEQ ID NO: 6088 - protein, 16 aa, Artificial Sequence
  source: /note="Description of Artificial Sequence: Synthetic peptide"
  MOD_RES (9)..(9): Citrulline
EIISTAKAXGQVEKWL

SEQ ID NO: 6089 - protein, 16 aa, Artificial Sequence
  source: /note="Description of Artificial Sequence: Synthetic peptide"
  MOD_RES (9)..(9): Citrulline
IDDIVTLVXGKLSMQN

SEQ ID NO: 6090 - protein, 16 aa, Artificial Sequence
  source: /note="Description of Artificial Sequence: Synthetic peptide"
  MOD_RES (5)..(5): Citrulline
  MOD_RES (13)..(13): Citrulline
VTLVXGKLSMQNXVTL

SEQ ID NO: 6091 - protein, 16 aa, Artificial Sequence
  source: /note="Description of Artificial Sequence: Synthetic peptide"
  MOD_RES (10)..(10): Citrulline
  MOD_RES (13)..(13): Citrulline
PQKCPGKAPXGLXIVT

SEQ ID NO: 6092 - protein, 16 aa, Artificial Sequence
  source: /note="Description of Artificial Sequence: Synthetic peptide"
  MOD_RES (6)..(6): Citrulline
  MOD_RES (9)..(9): Citrulline
PGKAPXGLXIVTADGK

SEQ ID NO: 6093 - protein, 16 aa, Artificial Sequence
  source: /note="Description of Artificial Sequence: Synthetic peptide"
  MOD_RES (5)..(5): Citrulline
  MOD_RES (14)..(14): Citrulline
TGGVXGHSSAATSXGA

SEQ ID NO: 6094 - protein, 16 aa, Artificial Sequence
  source: /note="Description of Artificial Sequence: Synthetic peptide"
  MOD_RES (1)..(1): Citrulline
  MOD_RES (10)..(10): Citrulline
XGHSSAATSXGAAGWS

SEQ ID NO: 6095 - protein, 16 aa, Artificial Sequence
  source: /note="Description of Artificial Sequence: Synthetic peptide"
  MOD_RES (6)..(6): Citrulline
SAATSXGAAGWSPSSS

SEQ ID NO: 6096 - protein, 16 aa, Artificial Sequence
  source: /note="Description of Artificial Sequence: Synthetic peptide"
  MOD_RES (2)..(2): Citrulline
SXGAAGWSPSSSGNPM

SEQ ID NO: 6097 - protein, 16 aa, Artificial Sequence
  source: /note="Description of Artificial Sequence: Synthetic peptide"
  MOD_RES (13)..(13): Citrulline
TSDEGSMNAFTGXGSP

SEQ ID NO: 6098 - protein, 16 aa, Artificial Sequence
  source: /note="Description of Artificial Sequence: Synthetic peptide"
  MOD_RES (9)..(9): Citrulline
  MOD_RES (14)..(14): Citrulline
GSMNAFTGXGSPGXGQ

SEQ ID NO: 6099 - protein, 16 aa, Artificial Sequence
  source: /note="Description of Artificial Sequence: Synthetic peptide"
  MOD_RES (5)..(5): Citrulline
  MOD_RES (10)..(10): Citrulline
AFTGXGSPGXGQKTKV

SEQ ID NO: 6100 - protein, 16 aa, Artificial Sequence
  source: /note="Description of Artificial Sequence: Synthetic peptide"
  MOD_RES (6)..(6): Citrulline
PVTGEXGQLLELSKES

SEQ ID NO: 6101 - protein, 16 aa, Artificial Sequence
  source: /note="Description of Artificial Sequence: Synthetic peptide"
  MOD_RES (2)..(2): Citrulline
EXGQLLELSKESSEEE

SEQ ID NO: 6102 - protein, 16 aa, Artificial Sequence
  source: /note="Description of Artificial Sequence: Synthetic peptide"
  MOD_RES (7)..(7): Citrulline
PAHATAXGELSAGQLL

SEQ ID NO: 6103 - protein, 16 aa, Artificial Sequence
  source: /note="Description of Artificial Sequence: Synthetic peptide"
  MOD_RES (3)..(3): Citrulline
TAXGELSAGQLLKWID

SEQ ID NO: 6104 - protein, 16 aa, Artificial Sequence
  source: /note="Description of Artificial Sequence: Synthetic peptide"
  MOD_RES (9)..(9): Citrulline
  MOD_RES (14)..(14): Citrulline
MTAWTMGAXGLDKXGS

SEQ ID NO: 6105 - protein, 16 aa, Artificial Sequence
  source: /note="Description of Artificial Sequence: Synthetic peptide"
  MOD_RES (5)..(5): Citrulline
  MOD_RES (10)..(10): Citrulline
TMGAXGLDKXGSFFKL

SEQ ID NO: 6106 - protein, 16 aa, Artificial Sequence
  source: /note="Description of Artificial Sequence: Synthetic peptide"
  MOD_RES (1)..(1): Citrulline
  MOD_RES (6)..(6): Citrulline
XGLDKXGSFFKLIDTI

SEQ ID NO: 6107 - protein, 16 aa, Artificial Sequence
  source: /note="Description of Artificial Sequence: Synthetic peptide"
  MOD_RES (4)..(4): Citrulline
  MOD_RES (7)..(7): Citrulline
KFEXLSXGKWNPDCLM

SEQ ID NO: 6108 - protein, 16 aa, Artificial Sequence
  source: /note="Description of Artificial Sequence: Synthetic peptide"
  MOD_RES (3)..(3): Citrulline
LSXGKWNPDCLMIDGL

SEQ ID NO: 6109 - protein, 16 aa, Artificial Sequence
  source: /note="Description of Artificial Sequence: Synthetic peptide"
  MOD_RES (6)..(6): Citrulline
IYSDVXGLSQNQQIPQ

SEQ ID NO: 6110 - protein, 16 aa, Artificial Sequence
  source: /note="Description of Artificial Sequence: Synthetic peptide"
  MOD_RES (2)..(2): Citrulline
VXGLSQNQQIPQNSVT

SEQ ID NO: 6111 - protein, 16 aa, Artificial Sequence
  source: /note="Description of Artificial Sequence: Synthetic peptide"
  MOD_RES (11)..(11): Citrulline
  MOD_RES (14)..(14): Citrulline
GTPPFKVNWFXGAXEL

SEQ ID NO: 6112 - protein, 16 aa, Artificial Sequence
  source: /note="Description of Artificial Sequence: Synthetic peptide"
  MOD_RES (7)..(7): Citrulline
  MOD_RES (10)..(10): Citrulline
FKVNWFXGAXELVKGD

SEQ ID NO: 6113 - protein, 16 aa, Artificial Sequence
  source: /note="Description of Artificial Sequence: Synthetic peptide"
  MOD_RES (3)..(3): Citrulline
  MOD_RES (9)..(9): Citrulline
TIXLEAGVXGKPFPEV

SEQ ID NO: 6114 - protein, 16 aa, Artificial Sequence
  source: /note="Description of Artificial Sequence: Synthetic peptide"
  MOD_RES (5)..(5): Citrulline
EAGVXGKPFPEVAWTK

SEQ ID NO: 6115 - protein, 16 aa, Artificial Sequence
  source: /note="Description of Artificial Sequence: Synthetic peptide"
  MOD_RES (1)..(1): Citrulline
XGKPFPEVAWTKDKDA

SEQ ID NO: 6116 - protein, 16 aa, Artificial Sequence
  source: /note="Description of Artificial Sequence: Synthetic peptide"
  MOD_RES (13)..(13): Citrulline
GPPGPITFKDVTXGSA

SEQ ID NO: 6117 - protein, 16 aa, Artificial Sequence
  source: /note="Description of Artificial Sequence: Synthetic peptide"
  MOD_RES (9)..(9): Citrulline
PITFKDVTXGSATLMW

SEQ ID NO: 6118 - protein, 16 aa, Artificial Sequence
  source: /note="Description of Artificial Sequence: Synthetic peptide"
  MOD_RES (5)..(5): Citrulline
KDVTXGSATLMWDAPL

SEQ ID NO: 6119 - protein, 16 aa, Artificial Sequence
  source: /note="Description of Artificial Sequence: Synthetic peptide"
  MOD_RES (4)..(4): Citrulline
  MOD_RES (11)..(11): Citrulline
YEHXVTAINAXGSGKP

SEQ ID NO: 6120 - protein, 16 aa, Artificial Sequence
  source: /note="Description of Artificial Sequence: Synthetic peptide"
  MOD_RES (7)..(7): Citrulline
  MOD_RES (14)..(14): Citrulline
VTAINAXGSGKPSXPS

SEQ ID NO: 6121 - protein, 16 aa, Artificial Sequence
  source: /note="Description of Artificial Sequence: Synthetic peptide"
  MOD_RES (6)..(6): Citrulline
SGFCPXGIGFKESILQ

SEQ ID NO: 6122 - protein, 16 aa, Artificial Sequence
  source: /note="Description of Artificial Sequence: Synthetic peptide"
  MOD_RES (10)..(10): Citrulline
GEAALAALAXGTPLLA

SEQ ID NO: 6123 - protein, 16 aa, Artificial Sequence
  source: /note="Description of Artificial Sequence: Synthetic peptide"
  MOD_RES (6)..(6): Citrulline
  MOD_RES (14)..(14): Citrulline
LAALAXGTPLLAVXNL

SEQ ID NO: 6124 - protein, 16 aa, Artificial Sequence
  source: /note="Description of Artificial Sequence: Synthetic peptide"
  MOD_RES (10)..(10): Citrulline
  MOD_RES (15)..(15): Citrulline
ILWIPAFMAXGGKEXV

SEQ ID NO: 6125 - protein, 16 aa, Artificial Sequence
  source: /note="Description of Artificial Sequence: Synthetic peptide"
  MOD_RES (6)..(6): Citrulline
  MOD_RES (11)..(11): Citrulline
PAFMAXGGKEXVEWVN

SEQ ID NO: 6126 - protein, 16 aa, Artificial Sequence
  source: /note="Description of Artificial Sequence: Synthetic peptide"
  MOD_RES (10)..(10): Citrulline
NKWQMNPYDXGSAFAI

SEQ ID NO: 6127 - protein, 16 aa, Artificial Sequence
  source: /note="Description of Artificial Sequence: Synthetic peptide"
  MOD_RES (6)..(6): Citrulline
MNPYDXGSAFAIGSDG

SEQ ID NO: 6128 - protein, 16 aa, Artificial Sequence
  source: /note="Description of Artificial Sequence: Synthetic peptide"
  MOD_RES (11)..(11): Citrulline
LESLEDAYILXGDDDS

SEQ ID NO: 6129 - protein, 16 aa, Artificial Sequence
  source: /note="Description of Artificial Sequence: Synthetic peptide"
  MOD_RES (7)..(7): Citrulline
EDAYILXGDDDSLSDK

SEQ ID NO: 6130 - protein, 16 aa, Artificial Sequence
  source: /note="Description of Artificial Sequence: Synthetic peptide"
  MOD_RES (7)..(8): Citrulline
SLFSKIXXGQFNIPET

SEQ ID NO: 6131 - protein, 16 aa, Artificial Sequence
  source: /note="Description of Artificial Sequence: Synthetic peptide"
  MOD_RES (3)..(4): Citrulline
KIXXGQFNIPETLSPK

SEQ ID NO: 6132 - protein, 16 aa, Artificial Sequence
  source: /note="Description of Artificial Sequence: Synthetic peptide"
  MOD_RES (8)..(8): Citrulline
  MOD_RES (11)..(11): Citrulline
PGDEPLPXPPXGAPHA

SEQ ID NO: 6133 - protein, 16 aa, Artificial Sequence
  source: /note="Description of Artificial Sequence: Synthetic peptide"
  MOD_RES (4)..(4): Citrulline
  MOD_RES (7)..(7): Citrulline
PLPXPPXGAPHASDQV

SEQ ID NO: 6134 - protein, 16 aa, Artificial Sequence
  source: /note="Description of Artificial Sequence: Synthetic peptide"
  MOD_RES (3)..(3): Citrulline
PPXGAPHASDQVLGPG

SEQ ID NO: 6135 - protein, 16 aa, Artificial Sequence
  source: /note="Description of Artificial Sequence: Synthetic peptide"
  MOD_RES (5)..(5): Citrulline
  MOD_RES (13)..(13): Citrulline
PLFIXNVLAAITXGTQ

SEQ ID NO: 6136 - protein, 16 aa, Artificial Sequence
  source: /note="Description of Artificial Sequence: Synthetic peptide"
  MOD_RES (1)..(1): Citrulline
  MOD_RES (9)..(9): Citrulline
XNVLAAITXGTQQLCF

SEQ ID NO: 6137 - protein, 16 aa, Artificial Sequence
  source: /note="Description of Artificial Sequence: Synthetic peptide"
  MOD_RES (9)..(9): Citrulline
  MOD_RES (12)..(12): Citrulline
HDMDYVNPXGVXFTQS

SEQ ID NO: 6138 - protein, 16 aa, Artificial Sequence
  source: /note="Description of Artificial Sequence: Synthetic peptide"
  MOD_RES (5)..(5): Citrulline
  MOD_RES (8)..(8): Citrulline
YVNPXGVXFTQSSQKE

SEQ ID NO: 6139 - protein, 16 aa, Artificial Sequence
  source: /note="Description of Artificial Sequence: Synthetic peptide"
  MOD_RES (12)..(12): Citrulline
HWVNDKGTILPXGPLM

SEQ ID NO: 6140 - protein, 16 aa, Artificial Sequence
  source: /note="Description of Artificial Sequence: Synthetic peptide"
  MOD_RES (8)..(8): Citrulline
DKGTILPXGPLMLSPS

SEQ ID NO: 6141 - protein, 16 aa, Artificial Sequence
  source: /note="Description of Artificial Sequence: Synthetic peptide"
  MOD_RES (9)..(9): Citrulline
  MOD_RES (12)..(12): Citrulline
AENLGEVLXGDXIVNT

SEQ ID NO: 6142 - protein, 16 aa, Artificial Sequence
  source: /note="Description of Artificial Sequence: Synthetic peptide"
  MOD_RES (5)..(5): Citrulline
  MOD_RES (8)..(8): Citrulline
GEVLXGDXIVNTPFQV

SEQ ID NO: 6143 - protein, 16 aa, Artificial Sequence
  source: /note="Description of Artificial Sequence: Synthetic peptide"
  MOD_RES (1)..(1): Citrulline
  MOD_RES (4)..(4): Citrulline
XGDXIVNTPFQVLMNS

SEQ ID NO: 6144 - protein, 16 aa, Artificial Sequence
  source: /note="Description of Artificial Sequence: Synthetic peptide"
  MOD_RES (4)..(4): Citrulline
  MOD_RES (10)..(10): Citrulline
YLCXNKYYGXGLSIEG

SEQ ID NO: 6145 - protein, 16 aa, Artificial Sequence
  source: /note="Description of Artificial Sequence: Synthetic peptide"
  MOD_RES (6)..(6): Citrulline
  MOD_RES (14)..(14): Citrulline
NKYYGXGLSIEGFXNA

SEQ ID NO: 6146 - protein, 16 aa, Artificial Sequence
  source: /note="Description of Artificial Sequence: Synthetic peptide"
  MOD_RES (7)..(7): Citrulline
  MOD_RES (11)..(11): Citrulline
SKFAGTXFLKXGANCE

SEQ ID NO: 6147 - protein, 16 aa, Artificial Sequence
  source: /note="Description of Artificial Sequence: Synthetic peptide"
  MOD_RES (3)..(3): Citrulline
  MOD_RES (7)..(7): Citrulline
GTXFLKXGANCEGDVA

SEQ ID NO: 6148 - protein, 16 aa, Artificial Sequence
  source: /note="Description of Artificial Sequence: Synthetic peptide"
  MOD_RES (8)..(8): Citrulline
EAEPVVPXGGFDSPFY

SEQ ID NO: 6149 - protein, 16 aa, Artificial Sequence
  source: /note="Description of Artificial Sequence: Synthetic peptide"
  MOD_RES (10)..(10): Citrulline
YLEDVKLQAXGQLQAA

SEQ ID NO: 6150 - protein, 16 aa, Artificial Sequence
  source: /note="Description of Artificial Sequence: Synthetic peptide"
  MOD_RES (6)..(6): Citrulline
  MOD_RES (15)..(15): Citrulline
VKLQAXGQLQAAESXY

SEQ ID NO: 6151 - protein, 16 aa, Artificial Sequence
  source: /note="Description of Artificial Sequence: Synthetic peptide"
  MOD_RES (6)..(6): Citrulline
  MOD_RES (11)..(11): Citrulline
ETKTPXPSSAXGSSGS

SEQ ID NO: 6152 - protein, 15 aa, Artificial Sequence
  source: /note="Description of Artificial Sequence: Synthetic peptide"
  MOD_RES (3)..(3): Citrulline
  MOD_RES (9)..(9): Citrulline
SAXGSSGSXGGGGSS

SEQ ID NO: 6153 - protein, 16 aa, Artificial Sequence
  source: /note="Description of Artificial Sequence: Synthetic peptide"
  MOD_RES (11)..(12): Citrulline
MQNIETVHPFXXGSAV

SEQ ID NO: 6154 - protein, 16 aa, Artificial Sequence
  source: /note="Description of Artificial Sequence: Synthetic peptide"
  MOD_RES (7)..(7): Citrulline
  MOD_RES (10)..(10): Citrulline
DHELVIXGTXLVLPMD

SEQ ID NO: 6155 - protein, 16 aa, Artificial Sequence
  source: /note="Description of Artificial Sequence: Synthetic peptide"
  MOD_RES (4)..(4): Citrulline
  MOD_RES (8)..(8): Citrulline
YLVXWGSXGFPKEIEM

SEQ ID NO: 6156 - protein, 16 aa, Artificial Sequence
  source: /note="Description of Artificial Sequence: Synthetic peptide"
  MOD_RES (4)..(4): Citrulline
WGSXGFPKEIEMLNNL

SEQ ID NO: 6157 - protein, 16 aa, Artificial Sequence
  source: /note="Description of Artificial Sequence: Synthetic peptide"
  MOD_RES (11)..(11): Citrulline
FHPNLDYYKAXGADLM

SEQ ID NO: 6158 - protein, 16 aa, Artificial Sequence
  source: /note="Description of Artificial Sequence: Synthetic peptide"
  MOD_RES (7)..(7): Citrulline
  MOD_RES (16)..(16): Citrulline
LDYYKAXGADLMNKSX

SEQ ID NO: 6159 - protein, 16 aa, Artificial Sequence
  source: /note="Description of Artificial Sequence: Synthetic peptide"
  MOD_RES (8)..(8): Citrulline
DDDGSSAXGSFSGQAQ

SEQ ID NO: 6160 - protein, 16 aa, Artificial Sequence
  source: /note="Description of Artificial Sequence: Synthetic peptide"
  MOD_RES (4)..(4): Citrulline
  MOD_RES (15)..(15): Citrulline
SSAXGSFSGQAQPLXT

SEQ ID NO: 6161 - protein, 16 aa, Artificial Sequence
  source: /note="Description of Artificial Sequence: Synthetic peptide"
  MOD_RES (10)..(10): Citrulline
  MOD_RES (16)..(16): Citrulline
DLKGEEGSFXGSVLQX

SEQ ID NO: 6162 - protein, 16 aa, Artificial Sequence
  source: /note="Description of Artificial Sequence: Synthetic peptide"
  MOD_RES (6)..(6): Citrulline
  MOD_RES (12)..(12): Citrulline
EEGSFXGSVLQXAAKF

SEQ ID NO: 6163 - protein, 16 aa, Artificial Sequence
  source: /note="Description of Artificial Sequence: Synthetic peptide"
  MOD_RES (2)..(2): Citrulline
  MOD_RES (8)..(8): Citrulline
FXGSVLQXAAKFGSLA

SEQ ID NO: 6164 - protein, 16 aa, Artificial Sequence
  source: /note="Description of Artificial Sequence: Synthetic peptide"
  MOD_RES (7)..(7): Citrulline
EQGGSAXGASFEELCH

SEQ ID NO: 6165 - protein, 16 aa, Artificial Sequence
  source: /note="Description of Artificial Sequence: Synthetic peptide"
  MOD_RES (11)..(11): Citrulline
AYLQCMLASYXGDTLL

SEQ ID NO: 6166 - protein, 16 aa, Artificial Sequence
  source: /note="Description of Artificial Sequence: Synthetic peptide"
  MOD_RES (7)..(7): Citrulline
CMLASYXGDTLLQALD

SEQ ID NO: 6167 - protein, 16 aa, Artificial Sequence
  source: /note="Description of Artificial Sequence: Synthetic peptide"
  MOD_RES (12)..(12): Citrulline
VNSYQAWQLATXGKVA

SEQ ID NO: 6168 - protein, 16 aa, Artificial Sequence
  source: /note="Description of Artificial Sequence: Synthetic peptide"
  MOD_RES (8)..(8): Citrulline
QAWQLATXGKVAEPAE

SEQ ID NO: 6169 - protein, 16 aa, Artificial Sequence
  source: /note="Description of Artificial Sequence: Synthetic peptide"
  MOD_RES (4)..(4): Citrulline
LATXGKVAEPAEYLKY

SEQ ID NO: 6170 - protein, 16 aa, Artificial Sequence
  source: /note="Description of Artificial Sequence: Synthetic peptide"
  MOD_RES (6)..(6): Citrulline
  MOD_RES (11)..(11): Citrulline
DSVQYXHLPSXGITQK

SEQ ID NO: 6171 - protein, 16 aa, Artificial Sequence
  source: /note="Description of Artificial Sequence: Synthetic peptide"
  MOD_RES (2)..(2): Citrulline
  MOD_RES (7)..(7): Citrulline
YXHLPSXGITQKEQDG

SEQ ID NO: 6172 - protein, 16 aa, Artificial Sequence
  source: /note="Description of Artificial Sequence: Synthetic peptide"
  MOD_RES (1)..(1): Citrulline
  MOD_RES (14)..(14): Citrulline
XGAPESCNDKAKLXGP

SEQ ID NO: 6173 - protein, 16 aa, Artificial Sequence
  source: /note="Description of Artificial Sequence: Synthetic peptide"
  MOD_RES (9)..(9): Citrulline
GGGGGAPAXGQVGAAA

SEQ ID NO: 6174 - protein, 16 aa, Artificial Sequence
  source: /note="Description of Artificial Sequence: Synthetic peptide"
  MOD_RES (6)..(6): Citrulline
  MOD_RES (9)..(9): Citrulline
GSHHEXKIXGSLKICS

SEQ ID NO: 6175 - protein, 16 aa, Artificial Sequence
  source: /note="Description of Artificial Sequence: Synthetic peptide"
  MOD_RES (3)..(3): Citrulline
  MOD_RES (10)..(10): Citrulline
LYXCVSQAPXGAGVSN

SEQ ID NO: 6176 - protein, 16 aa, Artificial Sequence
  source: /note="Description of Artificial Sequence: Synthetic peptide"
  MOD_RES (11)..(11): Citrulline
  MOD_RES (15)..(15): Citrulline
SFMDTHGYSTXGDQXS

SEQ ID NO: 6177 - protein, 16 aa, Artificial Sequence
  source: /note="Description of Artificial Sequence: Synthetic peptide"
  MOD_RES (7)..(7): Citrulline
  MOD_RES (11)..(11): Citrulline
THGYSTXGDQXSGGVT

SEQ ID NO: 6178 - protein, 16 aa, Artificial Sequence
  source: /note="Description of Artificial Sequence: Synthetic peptide"
  MOD_RES (6)..(6): Citrulline
  MOD_RES (9)..(9): Citrulline
VLMMQXVFXGKLLSND

SEQ ID NO: 6179 - protein, 16 aa, Artificial Sequence
  source: /note="Description of Artificial Sequence: Synthetic peptide"
  MOD_RES (2)..(2): Citrulline
  MOD_RES (5)..(5): Citrulline
QXVFXGKLLSNDEVTI

SEQ ID NO: 6180 - protein, 16 aa, Artificial Sequence
  source: /note="Description of Artificial Sequence: Synthetic peptide"
  MOD_RES (10)..(10): Citrulline
  MOD_RES (12)..(12): Citrulline
LDGNSDLTIXGXLLSL

SEQ ID NO: 6181 - protein, 16 aa, Artificial Sequence
  source: /note="Description of Artificial Sequence: Synthetic peptide"
  MOD_RES (6)..(6): Citrulline
  MOD_RES (8)..(8): Citrulline
SDLTIXGXLLSLVEKV

SEQ ID NO: 6182 - protein, 16 aa, Artificial Sequence
  source: /note="Description of Artificial Sequence: Synthetic peptide"
  MOD_RES (9)..(9): Citrulline
QINGYAVSXGFKDLEL

SEQ ID NO: 6183 - protein, 16 aa, Artificial Sequence
  source: /note="Description of Artificial Sequence: Synthetic peptide"
  MOD_RES (5)..(5): Citrulline
YAVSXGFKDLELDTPS

SEQ ID NO: 6184 - protein, 16 aa, Artificial Sequence
  source: /note="Description of Artificial Sequence: Synthetic peptide"
  MOD_RES (6)..(6): Citrulline
  MOD_RES (10)..(10): Citrulline
GQSWTXDASXGNLPKY

SEQ ID NO: 6185 - protein, 16 aa, Artificial Sequence
  source: /note="Description of Artificial Sequence: Synthetic peptide"
  MOD_RES (2)..(2): Citrulline
  MOD_RES (6)..(6): Citrulline
TXDASXGNLPKYSAFQ

SEQ ID NO: 6186 - protein, 16 aa, Artificial Sequence
  source: /note="Description of Artificial Sequence: Synthetic peptide"
  MOD_RES (10)..(10): Citrulline
TTGIVSTTQXGGKELG

SEQ ID NO: 6187 - protein, 16 aa, Artificial Sequence
  source: /note="Description of Artificial Sequence: Synthetic peptide"
  MOD_RES (6)..(6): Citrulline
  MOD_RES (14)..(14): Citrulline
VSTTQXGGKELGLXNS

SEQ ID NO: 6188 - protein, 16 aa, Artificial Sequence
  source: /note="Description of Artificial Sequence: Synthetic peptide"
  MOD_RES (7)..(7): Citrulline
  MOD_RES (9)..(9): Citrulline
SQATQEXLXGLLEKLT

SEQ ID NO: 6189 - protein, 16 aa, Artificial Sequence
  source: /note="Description of Artificial Sequence: Synthetic peptide"
  MOD_RES (3)..(3): Citrulline
  MOD_RES (5)..(5): Citrulline
QEXLXGLLEKLTAIAQ

SEQ ID NO: 6190 - protein, 16 aa, Artificial Sequence
  source: /note="Description of Artificial Sequence: Synthetic peptide"
  MOD_RES (10)..(10): Citrulline
GAQYEKYSFXGFPPED

SEQ ID NO: 6191 - protein, 16 aa, Artificial Sequence
  source: /note="Description of Artificial Sequence: Synthetic peptide"
  MOD_RES (6)..(6): Citrulline
EKYSFXGFPPEDLMPL

SEQ ID NO: 6192 - protein, 16 aa, Artificial Sequence
  source: /note="Description of Artificial Sequence: Synthetic peptide"
  MOD_RES (8)..(8): Citrulline
  MOD_RES (11)..(11): Citrulline
FTPSPDGXKAXGEVVD

SEQ ID NO: 6193 - protein, 16 aa, Artificial Sequence
  source: /note="Description of Artificial Sequence: Synthetic peptide"
  MOD_RES (4)..(4): Citrulline
  MOD_RES (7)..(7): Citrulline
PDGXKAXGEVVDYSEQ

SEQ ID NO: 6194 - protein, 16 aa, Artificial Sequence
  source: /note="Description of Artificial Sequence: Synthetic peptide"
  MOD_RES (13)..(13): Citrulline
TGKDMSPYEAYKXGII

SEQ ID NO: 6195 - protein, 16 aa, Artificial Sequence
  source: /note="Description of Artificial Sequence: Synthetic peptide"
  MOD_RES (9)..(9): Citrulline
  MOD_RES (14)..(14): Citrulline
MSPYEAYKXGIIDXGQ

SEQ ID NO: 6196 - protein, 16 aa, Artificial Sequence
  source: /note="Description of Artificial Sequence: Synthetic peptide"
  MOD_RES (5)..(5): Citrulline
  MOD_RES (10)..(10): Citrulline
EAYKXGIIDXGQYLQL

SEQ ID NO: 6197 - protein, 16 aa, Artificial Sequence
  source: /note="Description of Artificial Sequence: Synthetic peptide"
  MOD_RES (1)..(1): Citrulline
  MOD_RES (6)..(6): Citrulline
XGIIDXGQYLQLQELE

SEQ ID NO: 6198 - protein, 16 aa, Artificial Sequence
  source: /note="Description of Artificial Sequence: Synthetic peptide"
  MOD_RES (11)..(11): Citrulline
VKQPEYAVVQXGSMVS

SEQ ID NO: 6199 - protein, 16 aa, Artificial Sequence
  source: /note="Description of Artificial Sequence: Synthetic peptide"
  MOD_RES (7)..(7): Citrulline
EYAVVQXGSMVSFECK

SEQ ID NO: 6200 - protein, 16 aa, Artificial Sequence
  source: /note="Description of Artificial Sequence: Synthetic peptide"
  MOD_RES (14)..(14): Citrulline
TCTTCQKGLIMNPXGS

SEQ ID NO: 6201 - protein, 16 aa, Artificial Sequence
  source: /note="Description of Artificial Sequence: Synthetic peptide"
  MOD_RES (10)..(10): Citrulline
CQKGLIMNPXGSCMAN

SEQ ID NO: 6202 - protein, 16 aa, Artificial Sequence
  source: /note="Description of Artificial Sequence: Synthetic peptide"
  MOD_RES (6)..(6): Citrulline
LIMNPXGSCMANEKCS

SEQ ID NO: 6203 - protein, 16 aa, Artificial Sequence
  source: /note="Description of Artificial Sequence: Synthetic peptide"
  MOD_RES (3)..(3): Citrulline
  MOD_RES (14)..(14): Citrulline
GNXATNGAPSLVSXGM

SEQ ID NO: 6204 - protein, 16 aa, Artificial Sequence
  source: /note="Description of Artificial Sequence: Synthetic peptide"
  MOD_RES (10)..(10): Citrulline
TNGAPSLVSXGMQGAS

SEQ ID NO: 6205 - protein, 16 aa, Artificial Sequence
  source: /note="Description of Artificial Sequence: Synthetic peptide"
  MOD_RES (6)..(6): Citrulline
PSLVSXGMQGASANTL

SEQ ID NO: 6206 - protein, 16 aa, Artificial Sequence
  source: /note="Description of Artificial Sequence: Synthetic peptide"
  MOD_RES (8)..(8): Citrulline
KPFSLTSXGALFQEIS

SEQ ID NO: 6207 - protein, 16 aa, Artificial Sequence
  source: /note="Description of Artificial Sequence: Synthetic peptide"
  MOD_RES (4)..(4): Citrulline
LTSXGALFQEISSNDI

SEQ ID NO: 6208 - protein, 16 aa, Artificial Sequence
  source: /note="Description of Artificial Sequence: Synthetic peptide"
  MOD_RES (8)..(8): Citrulline
SKLLWSSXGAKLSPFA

SEQ ID NO: 6209 - protein, 16 aa, Artificial Sequence
  source: /note="Description of Artificial Sequence: Synthetic peptide"
  MOD_RES (4)..(4): Citrulline
WSSXGAKLSPFAPEQP

SEQ ID NO: 6210 - protein, 16 aa, Artificial Sequence
  source: /note="Description of Artificial Sequence: Synthetic peptide"
  MOD_RES (1)..(1): Citrulline
  MOD_RES (7)..(7): Citrulline
XQQQSGXGWYLGLNKE

SEQ ID NO: 6211 - protein, 16 aa, Artificial Sequence
  source: /note="Description of Artificial Sequence: Synthetic peptide"
  MOD_RES (3)..(3): Citrulline
SGXGWYLGLNKEGEIM

SEQ ID NO: 6212 - protein, 16 aa, Artificial Sequence
  source: /note="Description of Artificial Sequence: Synthetic peptide"
  MOD_RES (5)..(5): Citrulline
  MOD_RES (11)..(11): Citrulline
MNDKXQVSKEXGEKLA

SEQ ID NO: 6213 - protein, 16 aa, Artificial Sequence
  source: /note="Description of Artificial Sequence: Synthetic peptide"
  MOD_RES (1)..(1): Citrulline
  MOD_RES (7)..(7): Citrulline
XQVSKEXGEKLAIDYG

SEQ ID NO: 6214 - protein, 16 aa, Artificial Sequence
  source: /note="Description of Artificial Sequence: Synthetic peptide"
  MOD_RES (3)..(3): Citrulline
KEXGEKLAIDYGIKFL

SEQ ID NO: 6215 - protein, 16 aa, Artificial Sequence
  source: /note="Description of Artificial Sequence: Synthetic peptide"
  MOD_RES (5)..(5): Citrulline
  MOD_RES (9)..(9): Citrulline
SWWDXNLGXGSSAPSQ

SEQ ID NO: 6216 - protein, 12 aa, Artificial Sequence
  source: /note="Description of Artificial Sequence: Synthetic peptide"
  MOD_RES (1)..(1): Citrulline
  MOD_RES (5)..(5): Citrulline
XNLGXGSSAPSQ

SEQ ID NO: 6217 - protein, 16 aa, Artificial Sequence
  source: /note="Description of Artificial Sequence: Synthetic peptide"
  MOD_RES (10)..(10): Citrulline
DGMVGLIIGXGGEQIN

SEQ ID NO: 6218 - protein, 16 aa, Artificial Sequence
  source: /note="Description of Artificial Sequence: Synthetic peptide"
  MOD_RES (6)..(6): Citrulline
GLIIGXGGEQINKIQQ

SEQ ID NO: 6219 - protein, 16 aa, Artificial Sequence
  source: /note="Description of Artificial Sequence: Synthetic peptide"
  MOD_RES (10)..(10): Citrulline
THKCGLVIGXGGENVK

SEQ ID NO: 6220 - protein, 16 aa, Artificial Sequence
  source: /note="Description of Artificial Sequence: Synthetic peptide"
  MOD_RES (6)..(6): Citrulline
GLVIGXGGENVKAINQ

SEQ ID NO: 6221 - protein, 16 aa, Artificial Sequence
  source: /note="Description of Artificial Sequence: Synthetic peptide"
  MOD_RES (6)..(6): Citrulline
KLFIIXGSPQQIDHAK

SEQ ID NO: 6222 - protein, 16 aa, Artificial Sequence
  source: /note="Description of Artificial Sequence: Synthetic peptide"
  MOD_RES (2)..(2): Citrulline
IXGSPQQIDHAKQLIE

SEQ ID NO: 6223 - protein, 16 aa, Artificial Sequence
  source: /note="Description of Artificial Sequence: Synthetic peptide"
  MOD_RES (6)..(6): Citrulline
  MOD_RES (15)..(15): Citrulline
EDGCIXGFLLEKGMXG

SEQ ID NO: 6224 - protein, 16 aa, Artificial Sequence
  source: /note="Description of Artificial Sequence: Synthetic peptide"
  MOD_RES (2)..(2): Citrulline
  MOD_RES (11)..(11): Citrulline
IXGFLLEKGMXGLSAP

SEQ ID NO: 6225 - protein, 16 aa, Artificial Sequence
  source: /note="Description of Artificial Sequence: Synthetic peptide"
  MOD_RES (1)..(1): Citrulline
  MOD_RES (9)..(9): Citrulline
XKLEEAKSXGSLVDFI

SEQ ID NO: 6226 - protein, 16 aa, Artificial Sequence
  source: /note="Description of Artificial Sequence: Synthetic peptide"
  MOD_RES (5)..(5): Citrulline
  MOD_RES (14)..(14): Citrulline
EAKSXGSLVDFIKXFP

SEQ ID NO: 6227 - protein, 16 aa, Artificial Sequence
  source: /note="Description of Artificial Sequence: Synthetic peptide"
  MOD_RES (11)..(11): Citrulline
LALKEQQPKVXGWLLA

SEQ ID NO: 6228 - protein, 16 aa, Artificial Sequence
  source: /note="Description of Artificial Sequence: Synthetic peptide"
  MOD_RES (7)..(7): Citrulline
EQQPKVXGWLLASLDG

SEQ ID NO: 6229 - protein, 16 aa, Artificial Sequence
  source: /note="Description of Artificial Sequence: Synthetic peptide"
  MOD_RES (3)..(3): Citrulline
KVXGWLLASLDGQTTG

SEQ ID NO: 6230 - protein, 16 aa, Artificial Sequence
  source: /note="Description of Artificial Sequence: Synthetic peptide"
  MOD_RES (6)..(6): Citrulline
MTATTXGSPVGGNDNQ

SEQ ID NO: 6231 - protein, 16 aa, Artificial Sequence
  source: /note="Description of Artificial Sequence: Synthetic peptide"
  MOD_RES (2)..(2): Citrulline
TXGSPVGGNDNQGQAP

SEQ ID NO: 6232 - protein, 16 aa, Artificial Sequence
  source: /note="Description of Artificial Sequence: Synthetic peptide"
  MOD_RES (8)..(9): Citrulline
PNADMETXXGAYLNAL

SEQ ID NO: 6233 - protein, 16 aa, Artificial Sequence
  source: /note="Description of Artificial Sequence: Synthetic peptide"
  MOD_RES (11)..(11): Citrulline
  MOD_RES (13)..(13): Citrulline
SLLETQYQNVXGXPIF

SEQ ID NO: 6234 - protein, 16 aa, Artificial Sequence
  source: /note="Description of Artificial Sequence: Synthetic peptide"
  MOD_RES (7)..(7): Citrulline
  MOD_RES (9)..(9): Citrulline
TQYQNVXGXPIFWMEK

SEQ ID NO: 6235 - protein, 14 aa, Artificial Sequence
  source: /note="Description of Artificial Sequence: Synthetic peptide"
  MOD_RES (3)..(3): Citrulline
  MOD_RES (5)..(5): Citrulline
NVXGXPIFWMEKDI

SEQ ID NO: 6236 - protein, 16 aa, Artificial Sequence
  source: /note="Description of Artificial Sequence: Synthetic peptide"
  MOD_RES (6)..(6): Citrulline
  MOD_RES (9)..(9): Citrulline
FCVVLXGAXLGQAVLS

SEQ ID NO: 6237 - protein, 16 aa, Artificial Sequence
  source: /note="Description of Artificial Sequence: Synthetic peptide"
  MOD_RES (5)..(5): Citrulline
  MOD_RES (16)..(16): Citrulline
TLISXGDLAFGAPGPX

SEQ ID NO: 6238 - protein, 16 aa, Artificial Sequence
  source: /note="Description of Artificial Sequence: Synthetic peptide"
  MOD_RES (8)..(8): Citrulline
  MOD_RES (11)..(11): Citrulline
NEICVIQXGMXFSIDV

SEQ ID NO: 6239 - protein, 16 aa, Artificial Sequence
  source: /note="Description of Artificial Sequence: Synthetic peptide"
  MOD_RES (4)..(4): Citrulline
  MOD_RES (7)..(7): Citrulline
VIQXGMXFSIDVFEET

SEQ ID NO: 6240 - protein, 16 aa, Artificial Sequence
  source: /note="Description of Artificial Sequence: Synthetic peptide"
  MOD_RES (7)..(7): Citrulline
EFMGLIXGHYEAKQGG

SEQ ID NO: 6241 - protein, 16 aa, Artificial Sequence
  source: /note="Description of Artificial Sequence: Synthetic peptide"
  MOD_RES (3)..(3): Citrulline
LIXGHYEAKQGGFLPG

SEQ ID NO: 6242 - protein, 16 aa, Artificial Sequence
  source: /note="Description of Artificial Sequence: Synthetic peptide"
  MOD_RES (2)..(2): Citrulline
  MOD_RES (11)..(11): Citrulline
YXVPDFGVWEXGSKYN

SEQ ID NO: 6243 - protein, 16 aa, Artificial Sequence
  source: /note="Description of Artificial Sequence: Synthetic peptide"
  MOD_RES (7)..(7): Citrulline
DFGVWEXGSKYNNGST

SEQ ID NO: 6244 - protein, 16 aa, Artificial Sequence
  source: /note="Description of Artificial Sequence: Synthetic peptide"
  MOD_RES (3)..(3): Citrulline
WEXGSKYNNGSTELHS

SEQ ID NO: 6245 - protein, 16 aa, Artificial Sequence
  source: /note="Description of Artificial Sequence: Synthetic peptide"
  MOD_RES (6)..(6): Citrulline
YELQIXGGDKPALDLY

SEQ ID NO: 6246 - protein, 16 aa, Artificial Sequence
  source: /note="Description of Artificial Sequence: Synthetic peptide"
  MOD_RES (2)..(2): Citrulline
IXGGDKPALDLYQLSP

SEQ ID NO: 6247 - protein, 16 aa, Artificial Sequence
  source: /note="Description of Artificial Sequence: Synthetic peptide"
  MOD_RES (2)..(2): Citrulline
  MOD_RES (6)..(6): Citrulline
VXGFGXGSKQLGIPTA

SEQ ID NO: 6248 - protein, 16 aa, Artificial Sequence
  source: /note="Description of Artificial Sequence: Synthetic peptide"
  MOD_RES (2)..(2): Citrulline
GXGSKQLGIPTANFPE

SEQ ID NO: 6249 - protein, 16 aa, Artificial Sequence
  source: /note="Description of Artificial Sequence: Synthetic peptide"
  MOD_RES (11)..(11): Citrulline
  MOD_RES (14)..(14): Citrulline
GKSVGVGHVAXGAXNK

SEQ ID NO: 6250 - protein, 16 aa, Artificial Sequence
  source: /note="Description of Artificial Sequence: Synthetic peptide"
  MOD_RES (7)..(7): Citrulline
  MOD_RES (10)..(10): Citrulline
GVGHVAXGAXNKPPLG

SEQ ID NO: 6251 - protein, 16 aa, Artificial Sequence
  source: /note="Description of Artificial Sequence: Synthetic peptide"
  MOD_RES (3)..(3): Citrulline
  MOD_RES (6)..(6): Citrulline
VAXGAXNKPPLGPAIP

SEQ ID NO: 6252 - protein, 16 aa, Artificial Sequence
  source: /note="Description of Artificial Sequence: Synthetic peptide"
  MOD_RES (6)..(7): Citrulline
IDTNWXXGELKSPKVL

SEQ ID NO: 6253 - protein, 16 aa, Artificial Sequence
  source: /note="Description of Artificial Sequence: Synthetic peptide"
  MOD_RES (2)..(3): Citrulline
WXXGELKSPKVLKGHD

SEQ ID NO: 6254 - protein, 16 aa, Artificial Sequence
  source: /note="Description of Artificial Sequence: Synthetic peptide"
  MOD_RES (12)..(12): Citrulline
SYSGLVNDNWKXGKNE

SEQ ID NO: 6255 - protein, 16 aa, Artificial Sequence
  source: /note="Description of Artificial Sequence: Synthetic peptide"
  MOD_RES (8)..(8): Citrulline
  MOD_RES (13)..(13): Citrulline
LVNDNWKXGKNEXSLH

SEQ ID NO: 6256 - protein, 16 aa, Artificial Sequence
  source: /note="Description of Artificial Sequence: Synthetic peptide"
  MOD_RES (10)..(10): Citrulline
NEVMGTGAVXGQQSAF

SEQ ID NO: 6257 - protein, 16 aa, Artificial Sequence
  source: /note="Description of Artificial Sequence: Synthetic peptide"
  MOD_RES (6)..(6): Citrulline
GTGAVXGQQSAFAGAT

SEQ ID NO: 6258 - protein, 16 aa, Artificial Sequence
  source: /note="Description of Artificial Sequence: Synthetic peptide"
  MOD_RES (10)..(10): Citrulline
  MOD_RES (12)..(12): Citrulline
FKIEPPGLFXGXGDHP

SEQ ID NO: 6259 - protein, 16 aa, Artificial Sequence
  source: /note="Description of Artificial Sequence: Synthetic peptide"
  MOD_RES (6)..(6): Citrulline
  MOD_RES (8)..(8): Citrulline
PPGLFXGXGDHPKMGM

SEQ ID NO: 6260 - protein, 16 aa, Artificial Sequence
  source: /note="Description of Artificial Sequence: Synthetic peptide"
  MOD_RES (10)..(10): Citrulline
QAANPYWTSXGSSVSM

SEQ ID NO: 6261 - protein, 16 aa, Artificial Sequence
  source: /note="Description of Artificial Sequence: Synthetic peptide"
  MOD_RES (6)..(6): Citrulline
  MOD_RES (16)..(16): Citrulline
PYWTSXGSSVSMSGGX

SEQ ID NO: 6262 - protein, 16 aa, Artificial Sequence
  source: /note="Description of Artificial Sequence: Synthetic peptide"
  MOD_RES (11)..(11): Citrulline
TCDILSEKFHXGQALE

SEQ ID NO: 6263 - protein, 16 aa, Artificial Sequence
  source: /note="Description of Artificial Sequence: Synthetic peptide"
  MOD_RES (7)..(7): Citrulline
LSEKFHXGQALEALGQ

SEQ ID NO: 6264 - protein, 16 aa, Artificial Sequence
  source: /note="Description of Artificial Sequence: Synthetic peptide"
  MOD_RES (3)..(3): Citrulline
FHXGQALEALGQAQPV

SEQ ID NO: 6265 - protein, 16 aa, Artificial Sequence
  source: /note="Description of Artificial Sequence: Synthetic peptide"
  MOD_RES (7)..(7): Citrulline
QALMYLXGQLEPQWKM

SEQ ID NO: 6266 - protein, 16 aa, Artificial Sequence
  source: /note="Description of Artificial Sequence: Synthetic peptide"
  MOD_RES (3)..(3): Citrulline
YLXGQLEPQWKMLQCH

SEQ ID NO: 6267 - protein, 16 aa, Artificial Sequence
  source: /note="Description of Artificial Sequence: Synthetic peptide"
  MOD_RES (9)..(9): Citrulline
SVTQLAPGXGSNNSSL

SEQ ID NO: 6268 - protein, 16 aa, Artificial Sequence
  source: /note="Description of Artificial Sequence: Synthetic peptide"
  MOD_RES (1)..(1): Citrulline
  MOD_RES (12)..(12): Citrulline
XHPVAQSTDGIXGKVG

SEQ ID NO: 6269 - protein, 16 aa, Artificial Sequence
  source: /note="Description of Artificial Sequence: Synthetic peptide"
  MOD_RES (8)..(8): Citrulline
  MOD_RES (15)..(15): Citrulline
AQSTDGIXGKVGHAXG

SEQ ID NO: 6270 - protein, 16 aa, Artificial Sequence
  source: /note="Description of Artificial Sequence: Synthetic peptide"
  MOD_RES (11)..(11): Citrulline
  MOD_RES (15)..(15): Citrulline
ESALLDGWLQXGVGXG

SEQ ID NO: 6271 - protein, 16 aa, Artificial Sequence
  source: /note="Description of Artificial Sequence: Synthetic peptide"
  MOD_RES (9)..(9): Citrulline
GSFATQAYXGAQKPSP

SEQ ID NO: 6272 - protein, 16 aa, Artificial Sequence
  source: /note="Description of Artificial Sequence: Synthetic peptide"
  MOD_RES (5)..(5): Citrulline
TQAYXGAQKPSPLELI

SEQ ID NO: 6273 - protein, 16 aa, Artificial Sequence
  source: /note="Description of Artificial Sequence: Synthetic peptide"
  MOD_RES (11)..(11): Citrulline
  MOD_RES (14)..(14): Citrulline
PAGTGTPSLLXGKXGG

SEQ ID NO: 6274 - protein, 16 aa, Artificial Sequence
  source: /note="Description of Artificial Sequence: Synthetic peptide"
  MOD_RES (7)..(7): Citrulline
  MOD_RES (10)..(10): Citrulline
GTPSLLXGKXGGHATN

SEQ ID NO: 6275 - protein, 16 aa, Artificial Sequence
  source: /note="Description of Artificial Sequence: Synthetic peptide"
  MOD_RES (10)..(10): Citrulline
DGMVGFIIGXGGEQIS

SEQ ID NO: 6276 - protein, 16 aa, Artificial Sequence
  source: /note="Description of Artificial Sequence: Synthetic peptide"
  MOD_RES (6)..(6): Citrulline
  MOD_RES (13)..(13): Citrulline
GFIIGXGGEQISXIQQ

SEQ ID NO: 6277 - protein, 16 aa, Artificial Sequence
  source: /note="Description of Artificial Sequence: Synthetic peptide"
  MOD_RES (10)..(10): Citrulline
DPNMKLFTIXGTPQQI

SEQ ID NO: 6278 - protein, 16 aa, Artificial Sequence
  source: /note="Description of Artificial Sequence: Synthetic peptide"
  MOD_RES (6)..(6): Citrulline
  MOD_RES (16)..(16): Citrulline
KLFTIXGTPQQIDYAX

SEQ ID NO: 6279 - protein, 16 aa, Artificial Sequence
  source: /note="Description of Artificial Sequence: Synthetic peptide"
  MOD_RES (2)..(2): Citrulline
  MOD_RES (12)..(12): Citrulline
IXGTPQQIDYAXQLIE

SEQ ID NO: 6280 - protein, 16 aa, Artificial Sequence
  source: /note="Description of Artificial Sequence: Synthetic peptide"
  MOD_RES (6)..(6): Citrulline
  MOD_RES (9)..(9): Citrulline
WDQPVXYHXGDIFENV

SEQ ID NO: 6281 - protein, 16 aa, Artificial Sequence
  source: /note="Description of Artificial Sequence: Synthetic peptide"
  MOD_RES (2)..(2): Citrulline
  MOD_RES (5)..(5): Citrulline
VXYHXGDIFENVDYVQ

SEQ ID NO: 6282 - protein, 16 aa, Artificial Sequence
  source: /note="Description of Artificial Sequence: Synthetic peptide"
  MOD_RES (1)..(1): Citrulline
XGDIFENVDYVQFGED

SEQ ID NO: 6283 - protein, 16 aa, Artificial Sequence
  source: /note="Description of Artificial Sequence: Synthetic peptide"
  MOD_RES (8)..(8): Citrulline
CLTLYTGXGGELQKIG

SEQ ID NO: 6284 - protein, 16 aa, Artificial Sequence
  source: /note="Description of Artificial Sequence: Synthetic peptide"
  MOD_RES (4)..(4): Citrulline
YTGXGGELQKIGEFCM

SEQ ID NO: 6285 - protein, 16 aa, Artificial Sequence
  source: /note="Description of Artificial Sequence: Synthetic peptide"
  MOD_RES (8)..(8): Citrulline
  MOD_RES (12)..(12): Citrulline
HQFSHAGXSNGXGLIN

SEQ ID NO: 6286 - protein, 16 aa, Artificial Sequence
  source: /note="Description of Artificial Sequence: Synthetic peptide"
  MOD_RES (4)..(4): Citrulline
  MOD_RES (8)..(8): Citrulline
HAGXSNGXGLINPQLQ

SEQ ID NO: 6287 - protein, 16 aa, Artificial Sequence
  source: /note="Description of Artificial Sequence: Synthetic peptide"
  MOD_RES (11)..(11): Citrulline
  MOD_RES (13)..(13): Citrulline
TWLCYEVKIKXGXSNL

SEQ ID NO: 6288 - protein, 16 aa, Artificial Sequence
  source: /note="Description of Artificial Sequence: Synthetic peptide"
  MOD_RES (7)..(7): Citrulline
  MOD_RES (9)..(9): Citrulline
YEVKIKXGXSNLLWDT

SEQ ID NO: 6289 - protein, 16 aa, Artificial Sequence
  source: /note="Description of Artificial Sequence: Synthetic peptide"
  MOD_RES (10)..(10): Citrulline
FFAPALDVIXGSLSLT

SEQ ID NO: 6290 - protein, 16 aa, Artificial Sequence
  source: /note="Description of Artificial Sequence: Synthetic peptide"
  MOD_RES (6)..(6): Citrulline
ALDVIXGSLSLTNLSS

SEQ ID NO: 6291 - protein, 16 aa, Artificial Sequence
  source: /note="Description of Artificial Sequence: Synthetic peptide"
  MOD_RES (2)..(2): Citrulline
IXGSLSLTNLSSSMAG

SEQ ID NO: 6292 - protein, 16 aa, Artificial Sequence
  source: /note="Description of Artificial Sequence: Synthetic peptide"
  MOD_RES (5)..(6): Citrulline
LLYHXXGKALEEPAND

SEQ ID NO: 6293 - protein, 16 aa, Artificial Sequence
  source: /note="Description of Artificial Sequence: Synthetic peptide"
  MOD_RES (8)..(8): Citrulline
LPHMQAAXGSLANHTS

SEQ ID NO: 6294 - protein, 16 aa, Artificial Sequence
  source: /note="Description of Artificial Sequence: Synthetic peptide"
  MOD_RES (8)..(8): Citrulline
  MOD_RES (11)..(11): Citrulline
AGVQVGMXVVXGVDWK

SEQ ID NO: 6295 - protein, 16 aa, Artificial Sequence
  source: /note="Description of Artificial Sequence: Synthetic peptide"
  MOD_RES (4)..(4): Citrulline
  MOD_RES (7)..(7): Citrulline
VGMXVVXGVDWKWGQQ

SEQ ID NO: 6296 - protein, 16 aa, Artificial Sequence
  source: /note="Description of Artificial Sequence: Synthetic peptide"
  MOD_RES (3)..(3): Citrulline
VVXGVDWKWGQQDGGE

SEQ ID NO: 6297 - protein, 16 aa, Artificial Sequence
  source: /note="Description of Artificial Sequence: Synthetic peptide"
  MOD_RES (2)..(2): Citrulline
  MOD_RES (5)..(5): Citrulline
KXHGXGEIIGIQKLNS

SEQ ID NO: 6298 - protein, 16 aa, Artificial Sequence
  source: /note="Description of Artificial Sequence: Synthetic peptide"
  MOD_RES (1)..(1): Citrulline
XGEIIGIQKLNSDDTY

SEQ ID NO: 6299 - protein, 16 aa, Artificial Sequence
  source: /note="Description of Artificial Sequence: Synthetic peptide"
  MOD_RES (10)..(10): Citrulline
  MOD_RES (12)..(12): Citrulline
NAFYSNVLYXPXGAPK

SEQ ID NO: 6300 - protein, 16 aa, Artificial Sequence
  source: /note="Description of Artificial Sequence: Synthetic peptide"
  MOD_RES (6)..(6): Citrulline
  MOD_RES (8)..(8): Citrulline
SNVLYXPXGAPKKSED

SEQ ID NO: 6301 - protein, 16 aa, Artificial Sequence
  source: /note="Description of Artificial Sequence: Synthetic peptide"
  MOD_RES (2)..(2): Citrulline
  MOD_RES (4)..(4): Citrulline
YXPXGAPKKSEDCSGE

SEQ ID NO: 6302 - protein, 16 aa, Artificial Sequence
  source: /note="Description of Artificial Sequence: Synthetic peptide"
  MOD_RES (14)..(14): Citrulline
KLELVAGSGVYITXGQ

SEQ ID NO: 6303 - protein, 16 aa, Artificial Sequence
  source: /note="Description of Artificial Sequence: Synthetic peptide"
  MOD_RES (10)..(10): Citrulline
VAGSGVYITXGQLMNC

SEQ ID NO: 6304 - protein, 16 aa, Artificial Sequence
  source: /note="Description of Artificial Sequence: Synthetic peptide"
  MOD_RES (6)..(6): Citrulline
GVYITXGQLMNCHLCA

SEQ ID NO: 6305 - protein, 16 aa, Artificial Sequence
  source: /note="Description of Artificial Sequence: Synthetic peptide"
  MOD_RES (4)..(4): Citrulline
  MOD_RES (7)..(7): Citrulline
HQAXPGXGSAGPQLHG

SEQ ID NO: 6306 - protein, 16 aa, Artificial Sequence
  source: /note="Description of Artificial Sequence: Synthetic peptide"
  MOD_RES (3)..(3): Citrulline
PGXGSAGPQLHGSTKS

SEQ ID NO: 6307 - protein, 16 aa, Artificial Sequence
  source: /note="Description of Artificial Sequence: Synthetic peptide"
  MOD_RES (10)..(10): Citrulline
  MOD_RES (15)..(15): Citrulline
EPLLQKLVQXGAIEXD

SEQ ID NO: 6308 - protein, 16 aa, Artificial Sequence
  source: /note="Description of Artificial Sequence: Synthetic peptide"
  MOD_RES (6)..(6): Citrulline
  MOD_RES (11)..(11): Citrulline
QKLVQXGAIEXDAVNQ

SEQ ID NO: 6309 - protein, 16 aa, Artificial Sequence
  source: /note="Description of Artificial Sequence: Synthetic peptide"
  MOD_RES (12)..(12): Citrulline
EFLDHHKEQPVXGSTF

SEQ ID NO: 6310 - protein, 16 aa, Artificial Sequence
  source: /note="Description of Artificial Sequence: Synthetic peptide"
  MOD_RES (8)..(8): Citrulline
HHKEQPVXGSTFPSNL

SEQ ID NO: 6311 - protein, 16 aa, Artificial Sequence
  source: /note="Description of Artificial Sequence: Synthetic peptide"
  MOD_RES (3)..(3): Citrulline
  MOD_RES (7)..(7): Citrulline
IVXGFQXGAASFGTST

SEQ ID NO: 6312 - protein, 16 aa, Artificial Sequence
  source: /note="Description of Artificial Sequence: Synthetic peptide"
  MOD_RES (3)..(3): Citrulline
FQXGAASFGTSTAMAA

SEQ ID NO: 6313 - protein, 16 aa, Artificial Sequence
  source: /note="Description of Artificial Sequence: Synthetic peptide"
  MOD_RES (5)..(5): Citrulline
  MOD_RES (15)..(15): Citrulline
CAVCXGCSALGQLGXG

SEQ ID NO: 6314 - protein, 16 aa, Artificial Sequence
  source: /note="Description of Artificial Sequence: Synthetic peptide"
  MOD_RES (1)..(1): Citrulline
  MOD_RES (11)..(11): Citrulline
XGCSALGQLGXGHLTQ

SEQ ID NO: 6315 - protein, 16 aa, Artificial Sequence
  source: /note="Description of Artificial Sequence: Synthetic peptide"
  MOD_RES (11)..(11): Citrulline
WSAGYFSALSXGDPLP

SEQ ID NO: 6316 - protein, 16 aa, Artificial Sequence
  source: /note="Description of Artificial Sequence: Synthetic peptide"
  MOD_RES (7)..(7): Citrulline
  MOD_RES (16)..(16): Citrulline
YFSALSXGDPLPVKDX

SEQ ID NO: 6317 - protein, 16 aa, Artificial Sequence
  source: /note="Description of Artificial Sequence: Synthetic peptide"
  MOD_RES (9)..(9): Citrulline
NVLAKALTXGILHQDK

SEQ ID NO: 6318 - protein, 16 aa, Artificial Sequence
  source: /note="Description of Artificial Sequence: Synthetic peptide"
  MOD_RES (5)..(5): Citrulline
KALTXGILHQDKNLVV

SEQ ID NO: 6319 - protein, 16 aa, Artificial Sequence
  source: /note="Description of Artificial Sequence: Synthetic peptide"
  MOD_RES (8)..(8): Citrulline
MALADSTXGLPNGGGG

SEQ ID NO: 6320 - protein, 14 aa, Artificial Sequence
  source: /note="Description of Artificial Sequence: Synthetic peptide"
  MOD_RES (4)..(4): Citrulline
DSTXGLPNGGGGGG

SEQ ID NO: 6321 - protein, 16 aa, Artificial Sequence
  source: /note="Description of Artificial Sequence: Synthetic peptide"
  MOD_RES (7)..(7): Citrulline
  MOD_RES (14)..(14): Citrulline
YITIGYXGSYTIGXDA

SEQ ID NO: 6322 - protein, 16 aa, Artificial Sequence
  source: /note="Description of Artificial Sequence: Synthetic peptide"
  MOD_RES (3)..(3): Citrulline
  MOD_RES (10)..(10): Citrulline
GYXGSYTIGXDAQADA

SEQ ID NO: 6323 - protein, 16 aa, Artificial Sequence
  source: /note="Description of Artificial Sequence: Synthetic peptide"
  MOD_RES (6)..(6): Citrulline
  MOD_RES (9)..(9): Citrulline
LTQHQXIHXGEKPYVC

SEQ ID NO: 6324 - protein, 16 aa, Artificial Sequence
  source: /note="Description of Artificial Sequence: Synthetic peptide"
  MOD_RES (2)..(2): Citrulline
  MOD_RES (5)..(5): Citrulline
QXIHXGEKPYVCSECG

SEQ ID NO: 6325 - protein, 16 aa, Artificial Sequence
  source: /note="Description of Artificial Sequence: Synthetic peptide"
  MOD_RES (3)..(3): Citrulline
  MOD_RES (9)..(9): Citrulline
IPXQSFFNXGHGAPPG

SEQ ID NO: 6326 - protein, 16 aa, Artificial Sequence
  source: /note="Description of Artificial Sequence: Synthetic peptide"
  MOD_RES (5)..(5): Citrulline
SFFNXGHGAPPGGPGP

SEQ ID NO: 6327 - protein, 16 aa, Artificial Sequence
  source: /note="Description of Artificial Sequence: Synthetic peptide"
  MOD_RES (5)..(5): Citrulline
  MOD_RES (11)..(11): Citrulline
EDFHXKVYNIXGDMYQ

SEQ ID NO: 6328 - protein, 16 aa, Artificial Sequence
  source: /note="Description of Artificial Sequence: Synthetic peptide"
  MOD_RES (1)..(1): Citrulline
  MOD_RES (7)..(7): Citrulline
XKVYNIXGDMYQLDIL

SEQ ID NO: 6329 - protein, 16 aa, Artificial Sequence
  source: /note="Description of Artificial Sequence: Synthetic peptide"
  MOD_RES (1)..(1): Citrulline
  MOD_RES (10)..(10): Citrulline
XIVQTLCTVXGAALKV

SEQ ID NO: 6330 - protein, 16 aa, Artificial Sequence
  source: /note="Description of Artificial Sequence: Synthetic peptide"
  MOD_RES (6)..(6): Citrulline
TLCTVXGAALKVGQML

SEQ ID NO: 6331 - protein, 16 aa, Artificial Sequence
  source: /note="Description of Artificial Sequence: Synthetic peptide"
  MOD_RES (2)..(2): Citrulline
VXGAALKVGQMLSIQD

SEQ ID NO: 6332 - protein, 16 aa, Artificial Sequence
  source: /note="Description of Artificial Sequence: Synthetic peptide"
  MOD_RES (1)..(1): Citrulline
  MOD_RES (9)..(9): Citrulline
XDIYELVKXGEITIQE

SEQ ID NO: 6333 - protein, 16 aa, Artificial Sequence
  source: /note="Description of Artificial Sequence: Synthetic peptide"
  MOD_RES (2)..(2): Citrulline
  MOD_RES (4)..(4): Citrulline
CXFXGFEVMGNPGTFK

SEQ ID NO: 6334 - protein, 16 aa, Artificial Sequence
  source: /note="Description of Artificial Sequence: Synthetic peptide"
  MOD_RES (13)..(13): Citrulline
GFEVMGNPGTFKXGLL

SEQ ID NO: 6335 - protein, 16 aa, Artificial Sequence
  source: /note="Description of Artificial Sequence: Synthetic peptide"
  MOD_RES (8)..(8): Citrulline
VGLILPTXGQTLKDTT

SEQ ID NO: 6336 - protein, 16 aa, Artificial Sequence
  source: /note="Description of Artificial Sequence: Synthetic peptide"
  MOD_RES (4)..(4): Citrulline
LPTXGQTLKDTTSSSS

SEQ ID NO: 6337 - protein, 16 aa, Artificial Sequence
  source: /note="Description of Artificial Sequence: Synthetic peptide"
  MOD_RES (3)..(3): Citrulline
  MOD_RES (12)..(12): Citrulline
DLXQNKLTYTMXGHAD

SEQ ID NO: 6338 - protein, 16 aa, Artificial Sequence
  source: /note="Description of Artificial Sequence: Synthetic peptide"
  MOD_RES (8)..(8): Citrulline
NKLTYTMXGHADSVTG

SEQ ID NO: 6339 - protein, 16 aa, Artificial Sequence
  source: /note="Description of Artificial Sequence: Synthetic peptide"
  MOD_RES (6)..(6): Citrulline
  MOD_RES (10)..(10): Citrulline
GSSSPXFLPXGNAPSP

SEQ ID NO: 6340 - protein, 16 aa, Artificial Sequence
  source: /note="Description of Artificial Sequence: Synthetic peptide"
  MOD_RES (2)..(2): Citrulline
  MOD_RES (6)..(6): Citrulline
PXFLPXGNAPSPAPPP

SEQ ID NO: 6341 - protein, 16 aa, Artificial Sequence
  source: /note="Description of Artificial Sequence: Synthetic peptide"
  MOD_RES (4)..(4): Citrulline
  MOD_RES (12)..(12): Citrulline
EPGXLALKWGTXGGFN

SEQ ID NO: 6342 - protein, 16 aa, Artificial Sequence
  source: /note="Description of Artificial Sequence: Synthetic peptide"
  MOD_RES (8)..(8): Citrulline
LALKWGTXGGFNGQME

SEQ ID NO: 6343 - protein, 16 aa, Artificial Sequence
  source: /note="Description of Artificial Sequence: Synthetic peptide"
  MOD_RES (6)..(6): Citrulline
  MOD_RES (11)..(11): Citrulline
LVSSSXWLVKXGELTA

SEQ ID NO: 6344 - protein, 16 aa, Artificial Sequence
  source: /note="Description of Artificial Sequence: Synthetic peptide"
  MOD_RES (2)..(2): Citrulline
  MOD_RES (7)..(7): Citrulline
SXWLVKXGELTAYVED

SEQ ID NO: 6345 - protein, 16 aa, Artificial Sequence
  source: /note="Description of Artificial Sequence: Synthetic peptide"
  MOD_RES (9)..(9): Citrulline
  MOD_RES (14)..(14): Citrulline
LVVAGSLKXGDKNXPE

SEQ ID NO: 6346 - protein, 16 aa, Artificial Sequence
  source: /note="Description of Artificial Sequence: Synthetic peptide"
  MOD_RES (5)..(5): Citrulline
  MOD_RES (10)..(10): Citrulline
GSLKXGDKNXPEDQVL

SEQ ID NO: 6347 - protein, 16 aa, Artificial Sequence
  source: /note="Description of Artificial Sequence: Synthetic peptide"
  MOD_RES (2)..(2): Citrulline
  MOD_RES (16)..(16): Citrulline
FXGGGGGGLGNNGSSX

SEQ ID NO: 6348 - protein, 16 aa, Artificial Sequence
  source: /note="Description of Artificial Sequence: Synthetic peptide"
  MOD_RES (13)..(13): Citrulline
QVTCPYLPPFPAXGSG

SEQ ID NO: 6349 - protein, 16 aa, Artificial Sequence
  source: /note="Description of Artificial Sequence: Synthetic peptide"
  MOD_RES (9)..(9): Citrulline
  MOD_RES (15)..(15): Citrulline
PYLPPFPAXGSGIHXL

SEQ ID NO: 6350 - protein, 16 aa, Artificial Sequence
  source: /note="Description of Artificial Sequence: Synthetic peptide"
  MOD_RES (10)..(10): Citrulline
PVSPAPSPTXGIGKQC

SEQ ID NO: 6351 - protein, 16 aa, Artificial Sequence
  source: /note="Description of Artificial Sequence: Synthetic peptide"
  MOD_RES (6)..(6): Citrulline
APSPTXGIGKQCFSPS

SEQ ID NO: 6352 - protein, 16 aa, Artificial Sequence
  source: /note="Description of Artificial Sequence: Synthetic peptide"
  MOD_RES (2)..(2): Citrulline
TXGIGKQCFSPSLQSF

SEQ ID NO: 6353 - protein, 16 aa, Artificial Sequence
  source: /note="Description of Artificial Sequence: Synthetic peptide"
  MOD_RES (8)..(8): Citrulline
  MOD_RES (14)..(14): Citrulline
YESYGNSXSAPLTXGP

SEQ ID NO: 6354 - protein, 16 aa, Artificial Sequence
  source: /note="Description of Artificial Sequence: Synthetic peptide"
  MOD_RES (4)..(4): Citrulline
  MOD_RES (10)..(10): Citrulline
GNSXSAPLTXGPPPSY

SEQ ID NO: 6355 - protein, 16 aa, Artificial Sequence
  source: /note="Description of Artificial Sequence: Synthetic peptide"
  MOD_RES (6)..(6): Citrulline
SAPLTXGPPPSYGGSS

SEQ ID NO: 6356 - protein, 16 aa, Artificial Sequence
  source: /note="Description of Artificial Sequence: Synthetic peptide"
  MOD_RES (9)..(9): Citrulline
  MOD_RES (13)..(13): Citrulline
PQAHQESTXGAAXPAQ

SEQ ID NO: 6357 - protein, 16 aa, Artificial Sequence
  source: /note="Description of Artificial Sequence: Synthetic peptide"
  MOD_RES (5)..(5): Citrulline
  MOD_RES (9)..(9): Citrulline
QESTXGAAXPAQAIGT

SEQ ID NO: 6358 - protein, 16 aa, Artificial Sequence
  source: /note="Description of Artificial Sequence: Synthetic peptide"
  MOD_RES (8)..(8): Citrulline
  MOD_RES (10)..(10): Citrulline
TQLPAAPXGXSLYGAG

SEQ ID NO: 6359 - protein, 16 aa, Artificial Sequence
  source: /note="Description of Artificial Sequence: Synthetic peptide"
  MOD_RES (1)..(1): Citrulline
  MOD_RES (10)..(10): Citrulline
XTTPPGGGSXGCSLGV

SEQ ID NO: 6360 - protein, 16 aa, Artificial Sequence
  source: /note="Description of Artificial Sequence: Synthetic peptide"
  MOD_RES (6)..(6): Citrulline
  MOD_RES (15)..(15): Citrulline
GAAFCXACQTPNFVXG

SEQ ID NO: 6361 - protein, 16 aa, Artificial Sequence
  source: /note="Description of Artificial Sequence: Synthetic peptide"
  MOD_RES (2)..(2): Citrulline
  MOD_RES (11)..(11): Citrulline
CXACQTPNFVXGLHSE

SEQ ID NO: 6362 - protein, 16 aa, Artificial Sequence
  source: /note="Description of Artificial Sequence: Synthetic peptide"
  MOD_RES (7)..(7): Citrulline
QTPNFVXGLHSEPGLE

SEQ ID NO: 6363 - protein, 16 aa, Artificial Sequence
  source: /note="Description of Artificial Sequence: Synthetic peptide"
  MOD_RES (5)..(5): Citrulline
  MOD_RES (9)..(9): Citrulline
GDGHXLIMXGAHLTAL

SEQ ID NO: 6364 - protein, 16 aa, Artificial Sequence
  source: /note="Description of Artificial Sequence: Synthetic peptide"
  MOD_RES (13)..(13): Citrulline
QAIGGYGPPPAGXGAP

SEQ ID NO: 6365 - protein, 16 aa, Artificial Sequence
  source: /note="Description of Artificial Sequence: Synthetic peptide"
  MOD_RES (9)..(9): Citrulline
GYGPPPAGXGAPPPPP

SEQ ID NO: 6366 - protein, 16 aa, Artificial Sequence
  source: /note="Description of Artificial Sequence: Synthetic peptide"
  MOD_RES (10)..(10): Citrulline
ASMDAGTILXGSALLS

SEQ ID NO: 6367 - protein, 16 aa, Artificial Sequence
  source: /note="Description of Artificial Sequence: Synthetic peptide"
  MOD_RES (6)..(6): Citrulline
  MOD_RES (12)..(12): Citrulline
GPQPAXKVTLTXGGLQ

SEQ ID NO: 6368 - protein, 16 aa, Artificial Sequence
  source: /note="Description of Artificial Sequence: Synthetic peptide"
  MOD_RES (2)..(2): Citrulline
  MOD_RES (8)..(8): Citrulline
AXKVTLTXGGLQQPPH

SEQ ID NO: 6369 - protein, 16 aa, Artificial Sequence
  source: /note="Description of Artificial Sequence: Synthetic peptide"
  MOD_RES (4)..(4): Citrulline
TLTXGGLQQPPHLPAG

SEQ ID NO: 6370 - protein, 16 aa, Artificial Sequence
  source: /note="Description of Artificial Sequence: Synthetic peptide"
  MOD_RES (14)..(14): Citrulline
LPDFSDPLLGFEPXGT

SEQ ID NO: 6371 - protein, 16 aa, Artificial Sequence
  source: /note="Description of Artificial Sequence: Synthetic peptide"
  MOD_RES (10)..(10): Citrulline
SDPLLGFEPXGTAIGQ

SEQ ID NO: 6372 - protein, 16 aa, Artificial Sequence
  source: /note="Description of Artificial Sequence: Synthetic peptide"
  MOD_RES (6)..(6): Citrulline
  MOD_RES (13)..(13): Citrulline
LGFEPXGTAIGQXLVT

SEQ ID NO: 6373 - protein, 16 aa, Artificial Sequence
  source: /note="Description of Artificial Sequence: Synthetic peptide"
  MOD_RES (10)..(10): Citrulline
  MOD_RES (14)..(14): Citrulline
ELKIEEYVQXGLQXVG

SEQ ID NO: 6374 - protein, 16 aa, Artificial Sequence
  source: /note="Description of Artificial Sequence: Synthetic peptide"
  MOD_RES (6)..(6): Citrulline
  MOD_RES (10)..(10): Citrulline
EEYVQXGLQXVGLDPQ

SEQ ID NO: 6375 - protein, 16 aa, Artificial Sequence
  source: /note="Description of Artificial Sequence: Synthetic peptide"
  MOD_RES (8)..(8): Citrulline
DKSVLAFXGIPISELK

SEQ ID NO: 6376 - protein, 16 aa, Artificial Sequence
  source: /note="Description of Artificial Sequence: Synthetic peptide"
  MOD_RES (4)..(4): Citrulline
LAFXGIPISELKNHGI

SEQ ID NO: 6377 - protein, 16 aa, Artificial Sequence
  source: /note="Description of Artificial Sequence: Synthetic peptide"
  MOD_RES (8)..(8): Citrulline
CTSGGVLXGSGNQKVG

SEQ ID NO: 6378 - protein, 16 aa, Artificial Sequence
  source: /note="Description of Artificial Sequence: Synthetic peptide"
  MOD_RES (4)..(4): Citrulline
GVLXGSGNQKVGAIVN

SEQ ID NO: 6379 - protein, 16 aa, Artificial Sequence
  source: /note="Description of Artificial Sequence: Synthetic peptide"
  MOD_RES (8)..(8): Citrulline
KVAATGSXGELMLEAN

SEQ ID NO: 6380 - protein, 16 aa, Artificial Sequence
  source: /note="Description of Artificial Sequence: Synthetic peptide"
  MOD_RES (3)..(3): Citrulline
  MOD_RES (6)..(6): Citrulline
QLXTLXGTISEDALPP

SEQ ID NO: 6381 - protein, 16 aa, Artificial Sequence
  source: /note="Description of Artificial Sequence: Synthetic peptide"
  MOD_RES (2)..(2): Citrulline
  MOD_RES (16)..(16): Citrulline
LXGTISEDALPPGPPX

SEQ ID NO: 6382 - protein, 16 aa, Artificial Sequence
  source: /note="Description of Artificial Sequence: Synthetic peptide"
  MOD_RES (9)..(9): Citrulline
  MOD_RES (16)..(16): Citrulline
QQLDLYHGXGEAITLX

SEQ ID NO: 6383 - protein, 16 aa, Artificial Sequence
  source: /note="Description of Artificial Sequence: Synthetic peptide"
  MOD_RES (5)..(5): Citrulline
  MOD_RES (12)..(12): Citrulline
LYHGXGEAITLXFDGS

SEQ ID NO: 6384 - protein, 16 aa, Artificial Sequence
  source: /note="Description of Artificial Sequence: Synthetic peptide"
  MOD_RES (1)..(1): Citrulline
  MOD_RES (10)..(10): Citrulline
XSTKFQQIVXGMNQVL

SEQ ID NO: 6385 - protein, 16 aa, Artificial Sequence
  source: /note="Description of Artificial Sequence: Synthetic peptide"
  MOD_RES (6)..(6): Citrulline
FQQIVXGMNQVLDVPL

SEQ ID NO: 6386 - protein, 16 aa, Artificial Sequence
  source: /note="Description of Artificial Sequence: Synthetic peptide"
  MOD_RES (9)..(9): Citrulline
GVTGIMIAXGALLKPW

SEQ ID NO: 6387 - protein, 16 aa, Artificial Sequence
  source: /note="Description of Artificial Sequence: Synthetic peptide"
  MOD_RES (5)..(5): Citrulline
IMIAXGALLKPWLFTE

SEQ ID NO: 6388 - protein, 16 aa, Artificial Sequence
  source: /note="Description of Artificial Sequence: Synthetic peptide"
  MOD_RES (7)..(7): Citrulline
ILEYAPXGELYKELQK

SEQ ID NO: 6389 - protein, 16 aa, Artificial Sequence
  source: /note="Description of Artificial Sequence: Synthetic peptide"
  MOD_RES (5)..(5): Citrulline
  MOD_RES (14)..(14): Citrulline
AGISXDKVIPLYGXGS

SEQ ID NO: 6390 - protein, 16 aa, Artificial Sequence
  source: /note="Description of Artificial Sequence: Synthetic peptide"
  MOD_RES (1)..(1): Citrulline
  MOD_RES (10)..(10): Citrulline
XDKVIPLYGXGSTGQQ

SEQ ID NO: 6391 - protein, 16 aa, Artificial Sequence
  source: /note="Description of Artificial Sequence: Synthetic peptide"
  MOD_RES (6)..(6): Citrulline
  MOD_RES (15)..(15): Citrulline
IPLYGXGSTGQQDPXE

SEQ ID NO: 6392 - protein, 16 aa, Artificial Sequence
  source: /note="Description of Artificial Sequence: Synthetic peptide"
  MOD_RES (13)..(13): Citrulline
TCNACSSQALDGXGSL

SEQ ID NO: 6393 - protein, 16 aa, Artificial Sequence
  source: /note="Description of Artificial Sequence: Synthetic peptide"
  MOD_RES (9)..(9): Citrulline
CSSQALDGXGSLAPLT

SEQ ID NO: 6394 - protein, 16 aa, Artificial Sequence
  source: /note="Description of Artificial Sequence: Synthetic peptide"
  MOD_RES (1)..(1): Citrulline
  MOD_RES (10)..(10): Citrulline
XLVLKHYLQXGEVLDP

SEQ ID NO: 6395 - protein, 16 aa, Artificial Sequence
  source: /note="Description of Artificial Sequence: Synthetic peptide"
  MOD_RES (6)..(6): Citrulline
KHYLQXGEVLDPTAAN

SEQ ID NO: 6396 - protein, 16 aa, Artificial Sequence
  source: /note="Description of Artificial Sequence: Synthetic peptide"
  MOD_RES (11)..(11): Citrulline
  MOD_RES (14)..(14): Citrulline
TIEVFPTKSAXGNXVS

SEQ ID NO: 6397 - protein, 16 aa, Artificial Sequence
  source: /note="Description of Artificial Sequence: Synthetic peptide"
  MOD_RES (7)..(7): Citrulline
  MOD_RES (10)..(10): Citrulline
FPTKSAXGNXVSCMYV

SEQ ID NO: 6398 - protein, 16 aa, Artificial Sequence
  source: /note="Description of Artificial Sequence: Synthetic peptide"
  MOD_RES (12)..(12): Citrulline
CTPLFMNAYTMXGAGA

SEQ ID NO: 6399 - protein, 16 aa, Artificial Sequence
  source: /note="Description of Artificial Sequence: Synthetic peptide"
  MOD_RES (8)..(8): Citrulline
FMNAYTMXGAGAVIHT

SEQ ID NO: 6400 - protein, 16 aa, Artificial Sequence
  source: /note="Description of Artificial Sequence: Synthetic peptide"
  MOD_RES (8)..(8): Citrulline
AEAKYKEXGTVLAEDQ

SEQ ID NO: 6401 - protein, 16 aa, Artificial Sequence
  source: /note="Description of Artificial Sequence: Synthetic peptide"
  MOD_RES (4)..(4): Citrulline
YKEXGTVLAEDQLAQM

SEQ ID NO: 6402 - protein, 16 aa, Artificial Sequence
  source: /note="Description of Artificial Sequence: Synthetic peptide"
  MOD_RES (10)..(10): Citrulline
VVWACLQLPXGSPSSY

SEQ ID NO: 6403 - protein, 16 aa, Artificial Sequence
  source: /note="Description of Artificial Sequence: Synthetic peptide"
  MOD_RES (6)..(6): Citrulline
CLQLPXGSPSSYTVQT

SEQ ID NO: 6404 - protein, 16 aa, Artificial Sequence
  source: /note="Description of Artificial Sequence: Synthetic peptide"
  MOD_RES (2)..(2): Citrulline
PXGSPSSYTVQTAQDQ

SEQ ID NO: 6405 - protein, 16 aa, Artificial Sequence
  source: /note="Description of Artificial Sequence: Synthetic peptide"
  MOD_RES (5)..(5): Citrulline
  MOD_RES (13)..(13): Citrulline
YSSTXGISQLWKXNGP

SEQ ID NO: 6406 - protein, 16 aa, Artificial Sequence
  source: /note="Description of Artificial Sequence: Synthetic peptide"
  MOD_RES (5)..(5): Citrulline
  MOD_RES (12)..(12): Citrulline
SAQSXLGPGPPXGHSK

SEQ ID NO: 6407 - protein, 16 aa, Artificial Sequence
  source: /note="Description of Artificial Sequence: Synthetic peptide"
  MOD_RES (1)..(1): Citrulline
  MOD_RES (8)..(8): Citrulline
XLGPGPPXGHSKALAP

SEQ ID NO: 6408 - protein, 16 aa, Artificial Sequence
  source: /note="Description of Artificial Sequence: Synthetic peptide"
  MOD_RES (4)..(4): Citrulline
GPPXGHSKALAPQAAL

SEQ ID NO: 6409 - protein, 16 aa, Artificial Sequence
  source: /note="Description of Artificial Sequence: Synthetic peptide"
  MOD_RES (5)..(5): Citrulline
  MOD_RES (15)..(15): Citrulline
SFEGXSVPATPVLTXG

SEQ ID NO: 6410 - protein, 16 aa, Artificial Sequence
  source: /note="Description of Artificial Sequence: Synthetic peptide"
  MOD_RES (1)..(1): Citrulline
  MOD_RES (11)..(11): Citrulline
XSVPATPVLTXGAGPQ

SEQ ID NO: 6411 - protein, 16 aa, Artificial Sequence
  source: /note="Description of Artificial Sequence: Synthetic peptide"
  MOD_RES (7)..(7): Citrulline
ATPVLTXGAGPQLCKP

SEQ ID NO: 6412 - protein, 16 aa, Artificial Sequence
  source: /note="Description of Artificial Sequence: Synthetic peptide"
  MOD_RES (7)..(7): Citrulline
AKVASLXGMELQGCAS

SEQ ID NO: 6413 - protein, 16 aa, Artificial Sequence
  source: /note="Description of Artificial Sequence: Synthetic peptide"
  MOD_RES (3)..(3): Citrulline
SLXGMELQGCASTQVE

SEQ ID NO: 6414 - protein, 16 aa, Artificial Sequence
  source: /note="Description of Artificial Sequence: Synthetic peptide"
  MOD_RES (13)..(13): Citrulline
APPVTVQAATLAXGSG

SEQ ID NO: 6415 - protein, 16 aa, Artificial Sequence
  source: /note="Description of Artificial Sequence: Synthetic peptide"
  MOD_RES (9)..(9): Citrulline
  MOD_RES (13)..(13): Citrulline
TVQAATLAXGSGXPAS

SEQ ID NO: 6416 - protein, 16 aa, Artificial Sequence
  source: /note="Description of Artificial Sequence: Synthetic peptide"
  MOD_RES (3)..(3): Citrulline
  MOD_RES (6)..(6): Citrulline
TAXTTXGLDPLFGMCE

SEQ ID NO: 6417 - protein, 16 aa, Artificial Sequence
  source: /note="Description of Artificial Sequence: Synthetic peptide"
  MOD_RES (2)..(2): Citrulline
TXGLDPLFGMCEKFLQ

SEQ ID NO: 6418 - protein, 16 aa, Artificial Sequence
  source: /note="Description of Artificial Sequence: Synthetic peptide"
  MOD_RES (7)..(7): Citrulline
  MOD_RES (10)..(10): Citrulline
PPELMFXKMXGLSEFP

SEQ ID NO: 6419 - protein, 16 aa, Artificial Sequence
  source: /note="Description of Artificial Sequence: Synthetic peptide"
  MOD_RES (3)..(3): Citrulline
  MOD_RES (6)..(6): Citrulline
MFXKMXGLSEFPENFS

SEQ ID NO: 6420 - protein, 16 aa, Artificial Sequence
  source: /note="Description of Artificial Sequence: Synthetic peptide"
  MOD_RES (7)..(7): Citrulline
  MOD_RES (14)..(14): Citrulline
VGFIIGXGGEQISXIQ

SEQ ID NO: 6421 - protein, 16 aa, Artificial Sequence
  source: /note="Description of Artificial Sequence: Synthetic peptide"
  MOD_RES (5)..(5): Citrulline
  MOD_RES (12)..(12): Citrulline
SMKFXTDMAFVXGSSC

SEQ ID NO: 6422 - protein, 16 aa, Artificial Sequence
  source: /note="Description of Artificial Sequence: Synthetic peptide"
  MOD_RES (1)..(1): Citrulline
  MOD_RES (8)..(8): Citrulline
XTDMAFVXGSSCASDS

SEQ ID NO: 6423 - protein, 16 aa, Artificial Sequence
  source: /note="Description of Artificial Sequence: Synthetic peptide"
  MOD_RES (4)..(4): Citrulline
AFVXGSSCASDSPSLP

SEQ ID NO: 6424 - protein, 16 aa, Artificial Sequence
  source: /note="Description of Artificial Sequence: Synthetic peptide"
  MOD_RES (11)..(11): Citrulline
ASDASKPSSPXGSLLL

SEQ ID NO: 6425 - protein, 16 aa, Artificial Sequence
  source: /note="Description of Artificial Sequence: Synthetic peptide"
  MOD_RES (7)..(7): Citrulline
SKPSSPXGSLLLDGAG

SEQ ID NO: 6426 - protein, 16 aa, Artificial Sequence
  source: /note="Description of Artificial Sequence: Synthetic peptide"
  MOD_RES (3)..(3): Citrulline
SPXGSLLLDGAGAGGA

SEQ ID NO: 6427 - protein, 16 aa, Artificial Sequence
  source: /note="Description of Artificial Sequence: Synthetic peptide"
  MOD_RES (16)..(16): Citrulline
SLLLDGAGAGGAGGSX

SEQ ID NO: 6428 - protein, 16 aa, Artificial Sequence
  source: /note="Description of Artificial Sequence: Synthetic peptide"
  MOD_RES (8)..(8): Citrulline
  MOD_RES (13)..(13): Citrulline
KTWIEKPXGAGLXVAQ

SEQ ID NO: 6429 - protein, 16 aa, Artificial Sequence
  source: /note="Description of Artificial Sequence: Synthetic peptide"
  MOD_RES (4)..(4): Citrulline
  MOD_RES (6)..(6): Citrulline
MTGXMXGQAFITFPNK

SEQ ID NO: 6430 - protein, 16 aa, Artificial Sequence
  source: /note="Description of Artificial Sequence: Synthetic peptide"
  MOD_RES (2)..(2): Citrulline
MXGQAFITFPNKEIAW

SEQ ID NO: 6431 - protein, 16 aa, Artificial Sequence
  source: /note="Description of Artificial Sequence: Synthetic peptide"
  MOD_RES (13)..(13): Citrulline
LKVGTCPKDWPSXGEI

SEQ ID NO: 6432 - protein, 16 aa, Artificial Sequence
  source: /note="Description of Artificial Sequence: Synthetic peptide"
  MOD_RES (9)..(9): Citrulline
  MOD_RES (15)..(15): Citrulline
TCPKDWPSXGEITFXD

SEQ ID NO: 6433 - protein, 16 aa, Artificial Sequence
  source: /note="Description of Artificial Sequence: Synthetic peptide"
  MOD_RES (11)..(11): Citrulline
VPNSSGGLVNXGIDIG

SEQ ID NO: 6434 - protein, 16 aa, Artificial Sequence
  source: /note="Description of Artificial Sequence: Synthetic peptide"
  MOD_RES (10)..(10): Citrulline
YLKFDIEIGXGSFKTV

SEQ ID NO: 6435 - protein, 16 aa, Artificial Sequence
  source: /note="Description of Artificial Sequence: Synthetic peptide"
  MOD_RES (6)..(6): Citrulline
  MOD_RES (14)..(14): Citrulline
DIEIGXGSFKTVYXGL

SEQ ID NO: 6436 - protein, 16 aa, Artificial Sequence
  source: /note="Description of Artificial Sequence: Synthetic peptide"
  MOD_RES (2)..(2): Citrulline
  MOD_RES (10)..(10): Citrulline
GXGSFKTVYXGLDTDT

SEQ ID NO: 6437 - protein, 16 aa, Artificial Sequence
  source: /note="Description of Artificial Sequence: Synthetic peptide"
  MOD_RES (11)..(11): Citrulline
PQFADWSKETXGAPLI

SEQ ID NO: 6438 - protein, 16 aa, Artificial Sequence
  source: /note="Description of Artificial Sequence: Synthetic peptide"
  MOD_RES (7)..(7): Citrulline
DWSKETXGAPLISVKP

SEQ ID NO: 6439 - protein, 16 aa, Artificial Sequence
  source: /note="Description of Artificial Sequence: Synthetic peptide"
  MOD_RES (3)..(3): Citrulline
ETXGAPLISVKPLDNW

SEQ ID NO: 6440 - protein, 16 aa, Artificial Sequence
  source: /note="Description of Artificial Sequence: Synthetic peptide"
  MOD_RES (11)..(11): Citrulline
DCNTEVDCYSXGQAFH

SEQ ID NO: 6441 - protein, 16 aa, Artificial Sequence
  source: /note="Description of Artificial Sequence: Synthetic peptide"
  MOD_RES (5)..(5): Citrulline
  MOD_RES (14)..(14): Citrulline
FVQKXGNSTVYEWXTG

SEQ ID NO: 6442 - protein, 16 aa, Artificial Sequence
  source: /note="Description of Artificial Sequence: Synthetic peptide"
  MOD_RES (13)..(13): Citrulline
HMANCQVQVAPAXGKL

SEQ ID NO: 6443 - protein, 16 aa, Artificial Sequence
  source: /note="Description of Artificial Sequence: Synthetic peptide"
  MOD_RES (9)..(9): Citrulline
  MOD_RES (13)..(13): Citrulline
CQVQVAPAXGKLXPAC

SEQ ID NO: 6444 - protein, 16 aa, Artificial Sequence
  source: /note="Description of Artificial Sequence: Synthetic peptide"
  MOD_RES (5)..(5): Citrulline
  MOD_RES (9)..(9): Citrulline
VAPAXGKLXPACPGGM

SEQ ID NO: 6445 - protein, 16 aa, Artificial Sequence
  source: /note="Description of Artificial Sequence: Synthetic peptide"
  MOD_RES (8)..(8): Citrulline
  MOD_RES (13)..(13): Citrulline
MELWAPQXLPQTXGKA

SEQ ID NO: 6446 - protein, 16 aa, Artificial Sequence
  source: /note="Description of Artificial Sequence: Synthetic peptide"
  MOD_RES (4)..(4): Citrulline
  MOD_RES (9)..(9): Citrulline
APQXLPQTXGKATAPS

SEQ ID NO: 6447 - protein, 16 aa, Artificial Sequence
  source: /note="Description of Artificial Sequence: Synthetic peptide"
  MOD_RES (5)..(5): Citrulline
LPQTXGKATAPSKDPD

SEQ ID NO: 6448 - protein, 16 aa, Artificial Sequence
  source: /note="Description of Artificial Sequence: Synthetic peptide"
  MOD_RES (2)..(2): Citrulline
  MOD_RES (9)..(9): Citrulline
LXFNSAPTXGYEKDVG

SEQ ID NO: 6449 - protein, 16 aa, Artificial Sequence
  source: /note="Description of Artificial Sequence: Synthetic peptide"
  MOD_RES (5)..(5): Citrulline
SAPTXGYEKDVGNKTT

SEQ ID NO: 6450 - protein, 16 aa, Artificial Sequence
  source: /note="Description of Artificial Sequence: Synthetic peptide"
  MOD_RES (3)..(3): Citrulline
  MOD_RES (14)..(14): Citrulline
SLXGQAPSSTPGKXGS

SEQ ID NO: 6451 - protein, 16 aa, Artificial Sequence
  source: /note="Description of Artificial Sequence: Synthetic peptide"
  MOD_RES (6)..(6): Citrulline
  MOD_RES (15)..(15): Citrulline
STPGKXGSPQTPPGXS

SEQ ID NO: 6452 - protein, 16 aa, Artificial Sequence
  source: /note="Description of Artificial Sequence: Synthetic peptide"
  MOD_RES (6)..(6): Citrulline
GPPQSXGTSPLQPGSY

SEQ ID NO: 6453 - protein, 16 aa, Artificial Sequence
  source: /note="Description of Artificial Sequence: Synthetic peptide"
  MOD_RES (9)..(9): Citrulline
  MOD_RES (15)..(15): Citrulline
TGQKGASAXGFWGPXE

SEQ ID NO: 6454 - protein, 16 aa, Artificial Sequence
  source: /note="Description of Artificial Sequence: Synthetic peptide"
  MOD_RES (5)..(5): Citrulline
  MOD_RES (11)..(11): Citrulline
GASAXGFWGPXETKAL

SEQ ID NO: 6455 - protein, 16 aa, Artificial Sequence
  source: /note="Description of Artificial Sequence: Synthetic peptide"
  MOD_RES (6)..(6): Citrulline
  MOD_RES (10)..(10): Citrulline
GPGEDXPPPXGSSPIL

SEQ ID NO: 6456 - protein, 16 aa, Artificial Sequence
  source: /note="Description of Artificial Sequence: Synthetic peptide"
  MOD_RES (2)..(2): Citrulline
  MOD_RES (6)..(6): Citrulline
DXPPPXGSSPILSEGS

SEQ ID NO: 6457 - protein, 16 aa, Artificial Sequence
  source: /note="Description of Artificial Sequence: Synthetic peptide"
  MOD_RES (3)..(3): Citrulline
  MOD_RES (8)..(8): Citrulline
PEXTLPLXGAPWAQAP

SEQ ID NO: 6458 - protein, 16 aa, Artificial Sequence
  source: /note="Description of Artificial Sequence: Synthetic peptide"
  MOD_RES (4)..(4): Citrulline
  MOD_RES (15)..(15): Citrulline
LPLXGAPWAQAPPGXQ

SEQ ID NO: 6459 - protein, 16 aa, Artificial Sequence
  source: /note="Description of Artificial Sequence: Synthetic peptide"
  MOD_RES (9)..(9): Citrulline
  MOD_RES (14)..(14): Citrulline
EPIAMLVLXGSSSXGP

SEQ ID NO: 6460 - protein, 16 aa, Artificial Sequence
  source: /note="Description of Artificial Sequence: Synthetic peptide"
  MOD_RES (5)..(5): Citrulline
  MOD_RES (10)..(10): Citrulline
MLVLXGSSSXGPDAGC

SEQ ID NO: 6461 - protein, 16 aa, Artificial Sequence
  source: /note="Description of Artificial Sequence: Synthetic peptide"
  MOD_RES (10)..(10): Citrulline
  MOD_RES (13)..(13): Citrulline
LKGDLAYNYXGPXTKD

SEQ ID NO: 6462 - protein, 16 aa, Artificial Sequence
  source: /note="Description of Artificial Sequence: Synthetic peptide"
  MOD_RES (6)..(6): Citrulline
  MOD_RES (9)..(9): Citrulline
LAYNYXGPXTKDDIIE

SEQ ID NO: 6463 - protein, 16 aa, Artificial Sequence
  source: /note="Description of Artificial Sequence: Synthetic peptide"
  MOD_RES (8)..(8): Citrulline
ATSTPVAXGGGLPATF

SEQ ID NO: 6464 - protein, 16 aa, Artificial Sequence
  source: /note="Description of Artificial Sequence: Synthetic peptide"
  MOD_RES (4)..(4): Citrulline
PVAXGGGLPATFNKNT

SEQ ID NO: 6465 - protein, 16 aa, Artificial Sequence
  source: /note="Description of Artificial Sequence: Synthetic peptide"
  MOD_RES (1)..(1): Citrulline
  MOD_RES (10)..(10): Citrulline
XCNFESNFPXGFKKHL

SEQ ID NO: 6466 - protein, 16 aa, Artificial Sequence
  source: /note="Description of Artificial Sequence: Synthetic peptide"
  MOD_RES (6)..(6): Citrulline
ESNFPXGFKKHLTHCQ

SEQ ID NO: 6467 - protein, 16 aa, Artificial Sequence
  source: /note="Description of Artificial Sequence: Synthetic peptide"
  MOD_RES (7)..(7): Citrulline
  MOD_RES (16)..(16): Citrulline
LKIPQVXGMDLSWESX

SEQ ID NO: 6468 - protein, 16 aa, Artificial Sequence
  source: /note="Description of Artificial Sequence: Synthetic peptide"
  MOD_RES (3)..(3): Citrulline
  MOD_RES (12)..(12): Citrulline
QVXGMDLSWESXTGDQ

SEQ ID NO: 6469 - protein, 16 aa, Artificial Sequence
  source: /note="Description of Artificial Sequence: Synthetic peptide"
  MOD_RES (2)..(2): Citrulline
LXGLKITVNDSDQGAN

SEQ ID NO: 6470 - protein, 16 aa, Artificial Sequence
  source: /note="Description of Artificial Sequence: Synthetic peptide"
  MOD_RES (13)..(13): Citrulline
SYGGPGAGGPYPXGGS

SEQ ID NO: 6471 - protein, 16 aa, Artificial Sequence
  source: /note="Description of Artificial Sequence: Synthetic peptide"
  MOD_RES (9)..(9): Citrulline
PGAGGPYPXGGSLDPS

SEQ ID NO: 6472 - protein, 16 aa, Artificial Sequence
  source: /note="Description of Artificial Sequence: Synthetic peptide"
  MOD_RES (5)..(5): Citrulline
GPYPXGGSLDPSHSSG

SEQ ID NO: 6473 - protein, 16 aa, Artificial Sequence
  source: /note="Description of Artificial Sequence: Synthetic peptide"
  MOD_RES (1)..(1): Citrulline
  MOD_RES (13)..(13): Citrulline
XGGSLDPSHSSGXGSA

SEQ ID NO: 6474 - protein, 16 aa, Artificial Sequence
  source: /note="Description of Artificial Sequence: Synthetic peptide"
  MOD_RES (10)..(10): Citrulline
ASDQVLYLSXGGVGTT

SEQ ID NO: 6475 - protein, 16 aa, Artificial Sequence
  source: /note="Description of Artificial Sequence: Synthetic peptide"
  MOD_RES (6)..(6): Citrulline
VLYLSXGGVGTTPASE

SEQ ID NO: 6476 - protein, 16 aa, Artificial Sequence
  source: /note="Description of Artificial Sequence: Synthetic peptide"
  MOD_RES (4)..(4): Citrulline
  MOD_RES (11)..(11): Citrulline
AGIXTTKGLVXGSLGM

SEQ ID NO: 6477 - protein, 16 aa, Artificial Sequence
  source: /note="Description of Artificial Sequence: Synthetic peptide"
  MOD_RES (7)..(7): Citrulline
TTKGLVXGSLGMNITS

SEQ ID NO: 6478 - protein, 16 aa, Artificial Sequence
  source: /note="Description of Artificial Sequence: Synthetic peptide"
  MOD_RES (14)..(14): Citrulline
QQKVCKQCHEVLTXGS

SEQ ID NO: 6479 - protein, 16 aa, Artificial Sequence
  source: /note="Description of Artificial Sequence: Synthetic peptide"
  MOD_RES (10)..(10): Citrulline
CKQCHEVLTXGSSANA

SEQ ID NO: 6480 - protein, 16 aa, Artificial Sequence
  source: /note="Description of Artificial Sequence: Synthetic peptide"
  MOD_RES (6)..(6): Citrulline
HEVLTXGSSANASKWS

SEQ ID NO: 6481 - protein, 16 aa, Artificial Sequence
  source: /note="Description of Artificial Sequence: Synthetic peptide"
  MOD_RES (2)..(2): Citrulline
TXGSSANASKWSPPQN

SEQ ID NO: 6482 - protein, 16 aa, Artificial Sequence
  source: /note="Description of Artificial Sequence: Synthetic peptide"
  MOD_RES (2)..(2): Citrulline
  MOD_RES (13)..(13): Citrulline
LXALLWTPPPTPXGSH

SEQ ID NO: 6483 - protein, 16 aa, Artificial Sequence
  source: /note="Description of Artificial Sequence: Synthetic peptide"
  MOD_RES (9)..(9): Citrulline
  MOD_RES (15)..(15): Citrulline
LWTPPPTPXGSHSPXP

SEQ ID NO: 6484 - protein, 16 aa, Artificial Sequence
  source: /note="Description of Artificial Sequence: Synthetic peptide"
  MOD_RES (6)..(6): Citrulline
ESGKSXGEMQYMYFKA

SEQ ID NO: 6485 - protein, 16 aa, Artificial Sequence
  source: /note="Description of Artificial Sequence: Synthetic peptide"
  MOD_RES (14)..(14): Citrulline
QQKLLELALQQYPXGS

SEQ ID NO: 6486 - protein, 16 aa, Artificial Sequence
  source: /note="Description of Artificial Sequence: Synthetic peptide"
  MOD_RES (10)..(10): Citrulline
  MOD_RES (15)..(15): Citrulline
LELALQQYPXGSSDXW

SEQ ID NO: 6487 - protein, 16 aa, Artificial Sequence
  source: /note="Description of Artificial Sequence: Synthetic peptide"
  MOD_RES (6)..(6): Citrulline
  MOD_RES (11)..(11): Citrulline
LQQYPXGSSDXWDKIA

SEQ ID NO: 6488 - protein, 16 aa, Artificial Sequence
  source: /note="Description of Artificial Sequence: Synthetic peptide"
  MOD_RES (12)..(12): Citrulline
  MOD_RES (14)..(14): Citrulline
GSACNSGISGGXGXKI

SEQ ID NO: 6489 - protein, 13 aa, Artificial Sequence
  source: /note="Description of Artificial Sequence: Synthetic peptide"
  MOD_RES (8)..(8): Citrulline
  MOD_RES (10)..(10): Citrulline
NSGISGGXGXKIP

SEQ ID NO: 6490 - protein, 16 aa, Artificial Sequence
  source: /note="Description of Artificial Sequence: Synthetic peptide"
  MOD_RES (13)..(13): Citrulline
YVLTEVDGKLYGXGAT

SEQ ID NO: 6491 - protein, 16 aa, Artificial Sequence
  source: /note="Description of Artificial Sequence: Synthetic peptide"
  MOD_RES (9)..(9): Citrulline
EVDGKLYGXGATDNKG

SEQ ID NO: 6492 - protein, 16 aa, Artificial Sequence
  source: /note="Description of Artificial Sequence: Synthetic peptide"
  MOD_RES (11)..(11): Citrulline
EGIPWTKVTIXGENLG

SEQ ID NO: 6493 - protein, 16 aa, Artificial Sequence
  source: /note="Description of Artificial Sequence: Synthetic peptide"
  MOD_RES (7)..(7): Citrulline
WTKVTIXGENLGTGPT

SEQ ID NO: 6494 - protein, 16 aa, Artificial Sequence
  source: /note="Description of Artificial Sequence: Synthetic peptide"
  MOD_RES (3)..(3): Citrulline
TIXGENLGTGPTDLIG

SEQ ID NO: 6495 - protein, 16 aa, Artificial Sequence
  source: /note="Description of Artificial Sequence: Synthetic peptide"
  MOD_RES (9)..(9): Citrulline
LSQTASLKXGSSFQSG

SEQ ID NO: 6496 - protein, 16 aa, Artificial Sequence
  source: /note="Description of Artificial Sequence: Synthetic peptide"
  MOD_RES (5)..(5): Citrulline
  MOD_RES (13)..(13): Citrulline
ASLKXGSSFQSGXDDT

SEQ ID NO: 6497 - protein, 16 aa, Artificial Sequence
  source: /note="Description of Artificial Sequence: Synthetic peptide"
  MOD_RES (10)..(10): Citrulline
VMHSLVKLTXGALLPL

SEQ ID NO: 6498 - protein, 16 aa, Artificial Sequence
  source: /note="Description of Artificial Sequence: Synthetic peptide"
  MOD_RES (6)..(6): Citrulline
  MOD_RES (15)..(15): Citrulline
LVKLTXGALLPLSIXD

SEQ ID NO: 6499 - protein, 16 aa, Artificial Sequence
  source: /note="Description of Artificial Sequence: Synthetic peptide"
  MOD_RES (2)..(2): Citrulline
  MOD_RES (11)..(11): Citrulline
TXGALLPLSIXDGEAK

SEQ ID NO: 6500 - protein, 16 aa, Artificial Sequence
  source: /note="Description of Artificial Sequence: Synthetic peptide"
  MOD_RES (5)..(5): Citrulline
  MOD_RES (12)..(12): Citrulline
TLVEXDGKLYGXGSTD

SEQ ID NO: 6501 - protein, 16 aa, Artificial Sequence
  source: /note="Description of Artificial Sequence: Synthetic peptide"
  MOD_RES (1)..(1): Citrulline
  MOD_RES (8)..(8): Citrulline
XDGKLYGXGSTDDKGP

SEQ ID NO: 6502 - protein, 16 aa, Artificial Sequence
  source: /note="Description of Artificial Sequence: Synthetic peptide"
  MOD_RES (4)..(4): Citrulline
LYGXGSTDDKGPVAGW

SEQ ID NO: 6503 - protein, 16 aa, Artificial Sequence
  source: /note="Description of Artificial Sequence: Synthetic peptide"
  MOD_RES (6)..(6): Citrulline
  MOD_RES (11)..(11): Citrulline
HIEVIXMLLTXGADVT

SEQ ID NO: 6504 - protein, 16 aa, Artificial Sequence
  source: /note="Description of Artificial Sequence: Synthetic peptide"
  MOD_RES (2)..(2): Citrulline
  MOD_RES (7)..(7): Citrulline
IXMLLTXGADVTLTDN

SEQ ID NO: 6505 - protein, 16 aa, Artificial Sequence
  source: /note="Description of Artificial Sequence: Synthetic peptide"
  MOD_RES (3)..(3): Citrulline
LTXGADVTLTDNEENI

SEQ ID NO: 6506 - protein, 16 aa, Artificial Sequence
  source: /note="Description of Artificial Sequence: Synthetic peptide"
  MOD_RES (10)..(10): Citrulline
  MOD_RES (12)..(12): Citrulline
EDGSGCLVSXGXSQSD

SEQ ID NO: 6507 - protein, 16 aa, Artificial Sequence
  source: /note="Description of Artificial Sequence: Synthetic peptide"
  MOD_RES (6)..(6): Citrulline
  MOD_RES (8)..(8): Citrulline
GCLVSXGXSQSDPSVL

SEQ ID NO: 6508 - protein, 16 aa, Artificial Sequence
  source: /note="Description of Artificial Sequence: Synthetic peptide"
  MOD_RES (8)..(8): Citrulline
  MOD_RES (10)..(10): Citrulline
TLKGAVYXIXGSVSAA

SEQ ID NO: 6509 - protein, 16 aa, Artificial Sequence
  source: /note="Description of Artificial Sequence: Synthetic peptide"
  MOD_RES (4)..(4): Citrulline
  MOD_RES (6)..(6): Citrulline
AVYXIXGSVSAANYIQ

SEQ ID NO: 6510 - protein, 16 aa, Artificial Sequence
  source: /note="Description of Artificial Sequence: Synthetic peptide"
  MOD_RES (11)..(11): Citrulline
HSGSLGSSQLXGALQA

SEQ ID NO: 6511 - protein, 16 aa, Artificial Sequence
  source: /note="Description of Artificial Sequence: Synthetic peptide"
  MOD_RES (7)..(7): Citrulline
LGSSQLXGALQAAGFQ

SEQ ID NO: 6512 - protein, 16 aa, Artificial Sequence
  source: /note="Description of Artificial Sequence: Synthetic peptide"
  MOD_RES (8)..(8): Citrulline
  MOD_RES (10)..(10): Citrulline
EEESLLAXGXSSAQNK

SEQ ID NO: 6513 - protein, 16 aa, Artificial Sequence
  source: /note="Description of Artificial Sequence: Synthetic peptide"
  MOD_RES (4)..(4): Citrulline
  MOD_RES (6)..(6): Citrulline
LLAXGXSSAQNKQVDE

SEQ ID NO: 6514 - protein, 16 aa, Artificial Sequence
  source: /note="Description of Artificial Sequence: Synthetic peptide"
  MOD_RES (10)..(10): Citrulline
ECLGLTEMPXGKFICN

SEQ ID NO: 6515 - protein, 16 aa, Artificial Sequence
  source: /note="Description of Artificial Sequence: Synthetic peptide"
  MOD_RES (6)..(6): Citrulline
  MOD_RES (15)..(15): Citrulline
LTEMPXGKFICNECXT

SEQ ID NO: 6516 - protein, 16 aa, Artificial Sequence
  source: /note="Description of Artificial Sequence: Synthetic peptide"
  MOD_RES (11)..(11): Citrulline
  MOD_RES (13)..(13): Citrulline
TASAAPQGPLXGXPPI

SEQ ID NO: 6517 - protein, 16 aa, Artificial Sequence
  source: /note="Description of Artificial Sequence: Synthetic peptide"
  MOD_RES (7)..(7): Citrulline
  MOD_RES (9)..(9): Citrulline
APQGPLXGXPPIATFS

SEQ ID NO: 6518 - protein, 16 aa, Artificial Sequence
  source: /note="Description of Artificial Sequence: Synthetic peptide"
  MOD_RES (10)..(10): Citrulline
SESGYGFNVXGQVSEG

SEQ ID NO: 6519 - protein, 16 aa, Artificial Sequence
  source: /note="Description of Artificial Sequence: Synthetic peptide"
  MOD_RES (6)..(6): Citrulline
  MOD_RES (16)..(16): Citrulline
YGFNVXGQVSEGGQLX

SEQ ID NO: 6520 - protein, 16 aa, Artificial Sequence
  source: /note="Description of Artificial Sequence: Synthetic peptide"
  MOD_RES (2)..(2): Citrulline
  MOD_RES (9)..(9): Citrulline
GXQALAAAXGSWGPGP

SEQ ID NO: 6521 - protein, 16 aa, Artificial Sequence
  source: /note="Description of Artificial Sequence: Synthetic peptide"
  MOD_RES (5)..(5): Citrulline
LAAAXGSWGPGPSSLT

SEQ ID NO: 6522 - protein, 16 aa, Artificial Sequence
  source: /note="Description of Artificial Sequence: Synthetic peptide"
  MOD_RES (8)..(8): Citrulline
VQIATKLXGYQGLKES

SEQ ID NO: 6523 - protein, 16 aa, Artificial Sequence
  source: /note="Description of Artificial Sequence: Synthetic peptide"
  MOD_RES (4)..(4): Citrulline
TKLXGYQGLKESCFPA

SEQ ID NO: 6524 - protein, 16 aa, Artificial Sequence
  source: /note="Description of Artificial Sequence: Synthetic peptide"
  MOD_RES (7)..(7): Citrulline
  MOD_RES (11)..(11): Citrulline
MPPGTAXPGSXGCPIG

SEQ ID NO: 6525 - protein, 16 aa, Artificial Sequence
  source: /note="Description of Artificial Sequence: Synthetic peptide"
  MOD_RES (3)..(3): Citrulline
  MOD_RES (7)..(7): Citrulline
TAXPGSXGCPIGTGGV

SEQ ID NO: 6526 - protein, 16 aa, Artificial Sequence
  source: /note="Description of Artificial Sequence: Synthetic peptide"
  MOD_RES (5)..(5): Citrulline
  MOD_RES (11)..(11): Citrulline
SPPAXLSWTQXGQVLS

SEQ ID NO: 6527 - protein, 16 aa, Artificial Sequence
  source: /note="Description of Artificial Sequence: Synthetic peptide"
  MOD_RES (1)..(1): Citrulline
  MOD_RES (7)..(7): Citrulline
XLSWTQXGQVLSPSQP

SEQ ID NO: 6528 - protein, 16 aa, Artificial Sequence
  source: /note="Description of Artificial Sequence: Synthetic peptide"
  MOD_RES (3)..(3): Citrulline
TQXGQVLSPSQPSDPG

SEQ ID NO: 6529 - protein, 16 aa, Artificial Sequence
  source: /note="Description of Artificial Sequence: Synthetic peptide"
  MOD_RES (4)..(4): Citrulline
  MOD_RES (9)..(9): Citrulline
LPWXLLQAXGFPQNSA

SEQ ID NO: 6530 - protein, 16 aa, Artificial Sequence
  source: /note="Description of Artificial Sequence: Synthetic peptide"
  MOD_RES (5)..(5): Citrulline
LLQAXGFPQNSAPSLG

SEQ ID NO: 6531 - protein, 16 aa, Artificial Sequence
  source: /note="Description of Artificial Sequence: Synthetic peptide"
  MOD_RES (12)..(12): Citrulline
  MOD_RES (14)..(14): Citrulline
MKQKQEVMFQSXGXLS

SEQ ID NO: 6532 - protein, 16 aa, Artificial Sequence
  source: /note="Description of Artificial Sequence: Synthetic peptide"
  MOD_RES (8)..(8): Citrulline
  MOD_RES (10)..(10): Citrulline
QEVMFQSXGXLSLYIQ

SEQ ID NO: 6533 - protein, 16 aa, Artificial Sequence
  source: /note="Description of Artificial Sequence: Synthetic peptide"
  MOD_RES (2)..(2): Citrulline
  MOD_RES (11)..(11): Citrulline
SXVQLCTKSSXGHDLK

SEQ ID NO: 6534 - protein, 16 aa, Artificial Sequence
  source: /note="Description of Artificial Sequence: Synthetic peptide"
  MOD_RES (7)..(7): Citrulline
LCTKSSXGHDLKISAD

SEQ ID NO: 6535 - protein, 16 aa, Artificial Sequence
  source: /note="Description of Artificial Sequence: Synthetic peptide"
  MOD_RES (2)..(2): Citrulline
  MOD_RES (9)..(9): Citrulline
SXHFYGIQXGDIVIAK

SEQ ID NO: 6536 - protein, 16 aa, Artificial Sequence
  source: /note="Description of Artificial Sequence: Synthetic peptide"
  MOD_RES (5)..(5): Citrulline
YGIQXGDIVIAKSPSD

SEQ ID NO: 6537 - protein, 16 aa, Artificial Sequence
  source: /note="Description of Artificial Sequence: Synthetic peptide"
  MOD_RES (10)..(10): Citrulline
  MOD_RES (16)..(16): Citrulline
KDQLSYYETXGQSEDX

SEQ ID NO: 6538 - protein, 16 aa, Artificial Sequence
  source: /note="Description of Artificial Sequence: Synthetic peptide"
  MOD_RES (6)..(6): Citrulline
  MOD_RES (12)..(12): Citrulline
SYYETXGQSEDXIFPQ

SEQ ID NO: 6539 - protein, 16 aa, Artificial Sequence
  source: /note="Description of Artificial Sequence: Synthetic peptide"
  MOD_RES (3)..(3): Citrulline
  MOD_RES (8)..(8): Citrulline
EAXFQDVXGQLEKLKA

SEQ ID NO: 6540 - protein, 16 aa, Artificial Sequence
  source: /note="Description of Artificial Sequence: Synthetic peptide"
  MOD_RES (4)..(4): Citrulline
QDVXGQLEKLKADIQL

SEQ ID NO: 6541 - protein, 16 aa, Artificial Sequence
  source: /note="Description of Artificial Sequence: Synthetic peptide"
  MOD_RES (7)..(7): Citrulline
  MOD_RES (12)..(12): Citrulline
LPESPWXNPTPXGFLK

SEQ ID NO: 6542 - protein, 16 aa, Artificial Sequence
  source: /note="Description of Artificial Sequence: Synthetic peptide"
  MOD_RES (3)..(3): Citrulline
  MOD_RES (8)..(8): Citrulline
PWXNPTPXGFLKPLIN

SEQ ID NO: 6543 - protein, 16 aa, Artificial Sequence
  source: /note="Description of Artificial Sequence: Synthetic peptide"
  MOD_RES (4)..(4): Citrulline
PTPXGFLKPLINWDAI

SEQ ID NO: 6544 - protein, 16 aa, Artificial Sequence
  source: /note="Description of Artificial Sequence: Synthetic peptide"
  MOD_RES (11)..(11): Citrulline
NVPSSNFPGSXGSVSS

SEQ ID NO: 6545 - protein, 16 aa, Artificial Sequence
  source: /note="Description of Artificial Sequence: Synthetic peptide"
  MOD_RES (7)..(7): Citrulline
SNFPGSXGSVSSQLQY

SEQ ID NO: 6546 - protein, 16 aa, Artificial Sequence
  source: /note="Description of Artificial Sequence: Synthetic peptide"
  MOD_RES (8)..(8): Citrulline
EFIMKYKXGEINPVSA

SEQ ID NO: 6547 - protein, 16 aa, Artificial Sequence
  source: /note="Description of Artificial Sequence: Synthetic peptide"
  MOD_RES (4)..(4): Citrulline
KYKXGEINPVSALHQF

SEQ ID NO: 6548 - protein, 16 aa, Artificial Sequence
  source: /note="Description of Artificial Sequence: Synthetic peptide"
  MOD_RES (11)..(11): Citrulline
FLGSADLGLQXGVLKS

SEQ ID NO: 6549 - protein, 16 aa, Artificial Sequence
  source: /note="Description of Artificial Sequence: Synthetic peptide"
  MOD_RES (7)..(7): Citrulline
  MOD_RES (15)..(15): Citrulline
ADLGLQXGVLKSAAXT

SEQ ID NO: 6550 - protein, 16 aa, Artificial Sequence
  source: /note="Description of Artificial Sequence: Synthetic peptide"
  MOD_RES (10)..(10): Citrulline
  MOD_RES (14)..(14): Citrulline
PGKPLPPKTXGEQXQS

SEQ ID NO: 6551 - protein, 16 aa, Artificial Sequence
  source: /note="Description of Artificial Sequence: Synthetic peptide"
  MOD_RES (6)..(6): Citrulline
  MOD_RES (10)..(10): Citrulline
LPPKTXGEQXQSAFTE

SEQ ID NO: 6552 - protein, 16 aa, Artificial Sequence
  source: /note="Description of Artificial Sequence: Synthetic peptide"
  MOD_RES (10)..(10): Citrulline
GTLKQTSFQXGEPQNY

SEQ ID NO: 6553 - protein, 16 aa, Artificial Sequence
  source: /note="Description of Artificial Sequence: Synthetic peptide"
  MOD_RES (6)..(6): Citrulline
QTSFQXGEPQNYLAHT

SEQ ID NO: 6554 - protein, 16 aa, Artificial Sequence
  source: /note="Description of Artificial Sequence: Synthetic peptide"
  MOD_RES (4)..(4): Citrulline
  MOD_RES (11)..(11): Citrulline
QEPXLLKEKVXGLFEK

SEQ ID NO: 6555 - protein, 16 aa, Artificial Sequence
  source: /note="Description of Artificial Sequence: Synthetic peptide"
  MOD_RES (7)..(7): Citrulline
  MOD_RES (16)..(16): Citrulline
LLKEKVXGLFEKYVQX

SEQ ID NO: 6556 - protein, 16 aa, Artificial Sequence
  source: /note="Description of Artificial Sequence: Synthetic peptide"
  MOD_RES (3)..(3): Citrulline
  MOD_RES (12)..(12): Citrulline
KVXGLFEKYVQXADMV

SEQ ID NO: 6557 - protein, 16 aa, Artificial Sequence
  source: /note="Description of Artificial Sequence: Synthetic peptide"
  MOD_RES (4)..(4): Citrulline
  MOD_RES (10)..(10): Citrulline
PTGXFSVSPXGQLNIT

SEQ ID NO: 6558 - protein, 16 aa, Artificial Sequence
  source: /note="Description of Artificial Sequence: Synthetic peptide"
  MOD_RES (6)..(6): Citrulline
  MOD_RES (16)..(16): Citrulline
FSVSPXGQLNITAVQX

SEQ ID NO: 6559 - protein, 16 aa, Artificial Sequence
  source: /note="Description of Artificial Sequence: Synthetic peptide"
  MOD_RES (2)..(2): Citrulline
  MOD_RES (12)..(12): Citrulline
PXGQLNITAVQXGDAG

SEQ ID NO: 6560 - protein, 16 aa, Artificial Sequence
  source: /note="Description of Artificial Sequence: Synthetic peptide"
  MOD_RES (4)..(4): Citrulline
  MOD_RES (10)..(10): Citrulline
PYSXPSFLSXGQGTST

SEQ ID NO: 6561 - protein, 16 aa, Artificial Sequence
  source: /note="Description of Artificial Sequence: Synthetic peptide"
  MOD_RES (6)..(6): Citrulline
PSFLSXGQGTSTCSTA

SEQ ID NO: 6562 - protein, 16 aa, Artificial Sequence
  source: /note="Description of Artificial Sequence: Synthetic peptide"
  MOD_RES (14)..(14): Citrulline
GTSTCSTAGSNSSXGS

SEQ ID NO: 6563 - protein, 16 aa, Artificial Sequence
  source: /note="Description of Artificial Sequence: Synthetic peptide"
  MOD_RES (10)..(10): Citrulline
  MOD_RES (16)..(16): Citrulline
CSTAGSNSSXGSSSSX

SEQ ID NO: 6564 - protein, 16 aa, Artificial Sequence
  source: /note="Description of Artificial Sequence: Synthetic peptide"
  MOD_RES (14)..(14): Citrulline
KPFGCDVCGKEFAXGS

SEQ ID NO: 6565 - protein, 16 aa, Artificial Sequence
  source: /note="Description of Artificial Sequence: Synthetic peptide"
  MOD_RES (10)..(10): Citrulline
CDVCGKEFAXGSDLVK

SEQ ID NO: 6566 - protein, 16 aa, Artificial Sequence
  source: /note="Description of Artificial Sequence: Synthetic peptide"
  MOD_RES (6)..(6): Citrulline
  MOD_RES (15)..(15): Citrulline
GKEFAXGSDLVKHLXV

SEQ ID NO: 6567 - protein, 16 aa, Artificial Sequence
  source: /note="Description of Artificial Sequence: Synthetic peptide"
  MOD_RES (7)..(7): Citrulline
  MOD_RES (9)..(9): Citrulline
SNIAHSXGXVVKVSAQ

SEQ ID NO: 6568 - protein, 16 aa, Artificial Sequence
  source: /note="Description of Artificial Sequence: Synthetic peptide"
  MOD_RES (10)..(10): Citrulline
SWDSMPSSSXGMLLGP

SEQ ID NO: 6569 - protein, 16 aa, Artificial Sequence
  source: /note="Description of Artificial Sequence: Synthetic peptide"
  MOD_RES (6)..(6): Citrulline
MPSSSXGMLLGPPFLQ

SEQ ID NO: 6570 - protein, 16 aa, Artificial Sequence
  source: /note="Description of Artificial Sequence: Synthetic peptide"
  MOD_RES (2)..(2): Citrulline
SXGMLLGPPFLQEDSF

SEQ ID NO: 6571 - protein, 16 aa, Artificial Sequence
  source: /note="Description of Artificial Sequence: Synthetic peptide"
  MOD_RES (9)..(9): Citrulline
NGSQSSTYXGTYEQDG

SEQ ID NO: 6572 - protein, 16 aa, Artificial Sequence
  source: /note="Description of Artificial Sequence: Synthetic peptide"
  MOD_RES (5)..(5): Citrulline
  MOD_RES (13)..(13): Citrulline
SSTYXGTYEQDGXFEK

SEQ ID NO: 6573 - protein, 16 aa, Artificial Sequence
  source: /note="Description of Artificial Sequence: Synthetic peptide"
  MOD_RES (8)..(8): Citrulline
  MOD_RES (15)..(15): Citrulline
MSYGSIAXGGGLGSXG

SEQ ID NO: 6574 - protein, 16 aa, Artificial Sequence
  source: /note="Description of Artificial Sequence: Synthetic peptide"
  MOD_RES (4)..(4): Citrulline
  MOD_RES (11)..(11): Citrulline
SIAXGGGLGSXGPFGG

SEQ ID NO: 6575 - protein, 16 aa, Artificial Sequence
  source: /note="Description of Artificial Sequence: Synthetic peptide"
  MOD_RES (7)..(7): Citrulline
  MOD_RES (15)..(15): Citrulline
GGGLGSXGPFGGPSXQ

SEQ ID NO: 6576 - protein, 16 aa, Artificial Sequence
  source: /note="Description of Artificial Sequence: Synthetic peptide"
  MOD_RES (1)..(1): Citrulline
  MOD_RES (9)..(9): Citrulline
XALLPMAQXGSKQSPQ

SEQ ID NO: 6577 - protein, 16 aa, Artificial Sequence
  source: /note="Description of Artificial Sequence: Synthetic peptide"
  MOD_RES (5)..(5): Citrulline
PMAQXGSKQSPQAPFA

SEQ ID NO: 6578 - protein, 16 aa, Artificial Sequence
  source: /note="Description of Artificial Sequence: Synthetic peptide"
  MOD_RES (1)..(1): Citrulline
XGSKQSPQAPFAELAD

SEQ ID NO: 6579 - protein, 16 aa, Artificial Sequence
  source: /note="Description of Artificial Sequence: Synthetic peptide"
  MOD_RES (4)..(4): Citrulline
  MOD_RES (7)..(7): Citrulline
KTEXSHXGVKLNECNQ

SEQ ID NO: 6580 - protein, 16 aa, Artificial Sequence
  source: /note="Description of Artificial Sequence: Synthetic peptide"
  MOD_RES (3)..(3): Citrulline
SHXGVKLNECNQCFKV

SEQ ID NO: 6581 - protein, 16 aa, Artificial Sequence
  source: /note="Description of Artificial Sequence: Synthetic peptide"
  MOD_RES (7)..(8): Citrulline
CTPDLLXXGMVEQPKG

SEQ ID NO: 6582 - protein, 16 aa, Artificial Sequence
  source: /note="Description of Artificial Sequence: Synthetic peptide"
  MOD_RES (3)..(4): Citrulline
LLXXGMVEQPKGCGGG

SEQ ID NO: 6583 - protein, 16 aa, Artificial Sequence
  source: /note="Description of Artificial Sequence: Synthetic peptide"
  MOD_RES (6)..(6): Citrulline
IGLDSXGFIPVNKMMQ

SEQ ID NO: 6584 - protein, 16 aa, Artificial Sequence
  source: /note="Description of Artificial Sequence: Synthetic peptide"
  MOD_RES (2)..(2): Citrulline
SXGFIPVNKMMQTNVP

SEQ ID NO: 6585 - protein, 16 aa, Artificial Sequence
  source: /note="Description of Artificial Sequence: Synthetic peptide"
  MOD_RES (2)..(2): Citrulline
  MOD_RES (6)..(6): Citrulline
GXSQLXGLQEKLKQLE

SEQ ID NO: 6586 - protein, 16 aa, Artificial Sequence
  source: /note="Description of Artificial Sequence: Synthetic peptide"
  MOD_RES (2)..(2): Citrulline
LXGLQEKLKQLEPGAA

SEQ ID NO: 6587 - protein, 16 aa, Artificial Sequence
  source: /note="Description of Artificial Sequence: Synthetic peptide"
  MOD_RES (6)..(6): Citrulline
GPLLCXGDKSFWNSAS

SEQ ID NO: 6588 - protein, 16 aa, Artificial Sequence
  source: /note="Description of Artificial Sequence: Synthetic peptide"
  MOD_RES (2)..(2): Citrulline
CXGDKSFWNSASFNTE

SEQ ID NO: 6589 - protein, 16 aa, Artificial Sequence
  source: /note="Description of Artificial Sequence: Synthetic peptide"
  MOD_RES (4)..(4): Citrulline
  MOD_RES (9)..(9): Citrulline
HQSXCEFQXGSLEIGL

SEQ ID NO: 6590 - protein, 16 aa, Artificial Sequence
  source: /note="Description of Artificial Sequence: Synthetic peptide"
  MOD_RES (5)..(5): Citrulline
  MOD_RES (13)..(13): Citrulline
CEFQXGSLEIGLXPAG

SEQ ID NO: 6591 - protein, 16 aa, Artificial Sequence
  source: /note="Description of Artificial Sequence: Synthetic peptide"
  MOD_RES (11)..(11): Citrulline
  MOD_RES (14)..(14): Citrulline
KDLSCQAPWEXGQXGI

SEQ ID NO: 6592 - protein, 16 aa, Artificial Sequence
  source: /note="Description of Artificial Sequence: Synthetic peptide"
  MOD_RES (7)..(7): Citrulline
  MOD_RES (10)..(10): Citrulline
CQAPWEXGQXGITLQP

SEQ ID NO: 6593 - protein, 16 aa, Artificial Sequence
  source: /note="Description of Artificial Sequence: Synthetic peptide"
  MOD_RES (6)..(6): Citrulline
  MOD_RES (10)..(10): Citrulline
TEEKPXGQGXGPILPG

SEQ ID NO: 6594 - protein, 16 aa, Artificial Sequence
  source: /note="Description of Artificial Sequence: Synthetic peptide"
  MOD_RES (2)..(2): Citrulline
  MOD_RES (6)..(6): Citrulline
PXGQGXGPILPGTKAW

SEQ ID NO: 6595 - protein, 16 aa, Artificial Sequence
  source: /note="Description of Artificial Sequence: Synthetic peptide"
  MOD_RES (13)..(13): Citrulline
QITEPGNYQCKTXGSS

SEQ ID NO: 6596 - protein, 16 aa, Artificial Sequence
  source: /note="Description of Artificial Sequence: Synthetic peptide"
  MOD_RES (9)..(9): Citrulline
PGNYQCKTXGSSLSDA

SEQ ID NO: 6597 - protein, 16 aa, Artificial Sequence
  source: /note="Description of Artificial Sequence: Synthetic peptide"
  MOD_RES (5)..(5): Citrulline
QCKTXGSSLSDAVHVE

SEQ ID NO: 6598 - protein, 16 aa, Artificial Sequence
  source: /note="Description of Artificial Sequence: Synthetic peptide"
  MOD_RES (9)..(9): Citrulline
GEKGEPGVXGAIGSKG

SEQ ID NO: 6599 - protein, 16 aa, Artificial Sequence
  source: /note="Description of Artificial Sequence: Synthetic peptide"
  MOD_RES (5)..(5): Citrulline
EPGVXGAIGSKGESGV

SEQ ID NO: 6600 - protein, 16 aa, Artificial Sequence
  source: /note="Description of Artificial Sequence: Synthetic peptide"
  MOD_RES (10)..(10): Citrulline
TGQVCLFLKXGADQHA

SEQ ID NO: 6601 - protein, 16 aa, Artificial Sequence
  source: /note="Description of Artificial Sequence: Synthetic peptide"
  MOD_RES (6)..(6): Citrulline
CLFLKXGADQHALDQE

SEQ ID NO: 6602 - protein, 16 aa, Artificial Sequence
  source: /note="Description of Artificial Sequence: Synthetic peptide"
  MOD_RES (12)..(12): Citrulline
  MOD_RES (16)..(16): Citrulline
FPSYLASPAGSXGSSX

SEQ ID NO: 6603 - protein, 16 aa, Artificial Sequence
  source: /note="Description of Artificial Sequence: Synthetic peptide"
  MOD_RES (8)..(8): Citrulline
  MOD_RES (12)..(12): Citrulline
LASPAGSXGSSXYSST

SEQ ID NO: 6604 - protein, 16 aa, Artificial Sequence
  source: /note="Description of Artificial Sequence: Synthetic peptide"
  MOD_RES (11)..(11): Citrulline
GSYWCGAETVXGNIHK

SEQ ID NO: 6605 - protein, 16 aa, Artificial Sequence
  source: /note="Description of Artificial Sequence: Synthetic peptide"
  MOD_RES (7)..(7): Citrulline
CGAETVXGNIHKHSPS

SEQ ID NO: 6606 - protein, 16 aa, Artificial Sequence
  source: /note="Description of Artificial Sequence: Synthetic peptide"
  MOD_RES (10)..(10): Citrulline
PSVSLGAPYXGQLASP

SEQ ID NO: 6607 - protein, 16 aa, Artificial Sequence
  source: /note="Description of Artificial Sequence: Synthetic peptide"
  MOD_RES (6)..(6): Citrulline
LGAPYXGQLASPSSQS

SEQ ID NO: 6608 - protein, 16 aa, Artificial Sequence
  source: /note="Description of Artificial Sequence: Synthetic peptide"
  MOD_RES (13)..(13): Citrulline
TTSSMVASAEHPXGSV

SEQ ID NO: 6609 - protein, 16 aa, Artificial Sequence
  source: /note="Description of Artificial Sequence: Synthetic peptide"
  MOD_RES (9)..(9): Citrulline
MVASAEHPXGSVHEQL

SEQ ID NO: 6610 - protein, 16 aa, Artificial Sequence
  source: /note="Description of Artificial Sequence: Synthetic peptide"
  MOD_RES (5)..(5): Citrulline
AEHPXGSVHEQLSKKS

SEQ ID NO: 6611 - protein, 16 aa, Artificial Sequence
  source: /note="Description of Artificial Sequence: Synthetic peptide"
  MOD_RES (12)..(13): Citrulline
NKWTLCAQMSKXXGGV

SEQ ID NO: 6612 - protein, 16 aa, Artificial Sequence
  source: /note="Description of Artificial Sequence: Synthetic peptide"
  MOD_RES (8)..(9): Citrulline
LCAQMSKXXGGVGVTT

SEQ ID NO: 6613 - protein, 16 aa, Artificial Sequence
  source: /note="Description of Artificial Sequence: Synthetic peptide"
  MOD_RES (4)..(4): Citrulline
  MOD_RES (8)..(8): Citrulline
ECQXLFYXGKQLENGY

SEQ ID NO: 6614 - protein, 16 aa, Artificial Sequence
  source: /note="Description of Artificial Sequence: Synthetic peptide"
  MOD_RES (4)..(4): Citrulline
LFYXGKQLENGYTLFD

SEQ ID NO: 6615 - protein, 16 aa, Artificial Sequence
  source: /note="Description of Artificial Sequence: Synthetic peptide"
  MOD_RES (1)..(1): Citrulline
  MOD_RES (6)..(6): Citrulline
XILGPXGLTAKQLEAE

SEQ ID NO: 6616 - protein, 16 aa, Artificial Sequence
  source: /note="Description of Artificial Sequence: Synthetic peptide"
  MOD_RES (3)..(3): Citrulline
  MOD_RES (10)..(10): Citrulline
KLXAPAYSFXGAPMLL

SEQ ID NO: 6617 - protein, 16 aa, Artificial Sequence
  source: /note="Description of Artificial Sequence: Synthetic peptide"
  MOD_RES (6)..(6): Citrulline
PAYSFXGAPMLLAENC

SEQ ID NO: 6618 - protein, 16 aa, Artificial Sequence
  source: /note="Description of Artificial Sequence: Synthetic peptide"
  MOD_RES (1)..(1): Citrulline
  MOD_RES (6)..(6): Citrulline
XASIHXGSIPAMSYAP

SEQ ID NO: 6619 - protein, 16 aa, Artificial Sequence
  source: /note="Description of Artificial Sequence: Synthetic peptide"
  MOD_RES (2)..(2): Citrulline
  MOD_RES (14)..(14): Citrulline
HXGSIPAMSYAPFXDV

SEQ ID NO: 6620 - protein, 16 aa, Artificial Sequence
  source: /note="Description of Artificial Sequence: Synthetic peptide"
  MOD_RES (11)..(11): Citrulline
SSIDLQSFMAXGLNSS

SEQ ID NO: 6621 - protein, 16 aa, Artificial Sequence
  source: /note="Description of Artificial Sequence: Synthetic peptide"
  MOD_RES (7)..(7): Citrulline
LQSFMAXGLNSSMDMA

SEQ ID NO: 6622 - protein, 16 aa, Artificial Sequence
  source: /note="Description of Artificial Sequence: Synthetic peptide"
  MOD_RES (14)..(14): Citrulline
SGGGGGGQPPPLQXGK

SEQ ID NO: 6623 - protein, 16 aa, Artificial Sequence
  source: /note="Description of Artificial Sequence: Synthetic peptide"
  MOD_RES (10)..(10): Citrulline
GGGQPPPLQXGKSQQL

SEQ ID NO: 6624 - protein, 16 aa, Artificial Sequence
  source: /note="Description of Artificial Sequence: Synthetic peptide"
  MOD_RES (6)..(6): Citrulline
PPPLQXGKSQQLTVSA

SEQ ID NO: 6625 - protein, 16 aa, Artificial Sequence
  source: /note="Description of Artificial Sequence: Synthetic peptide"
  MOD_RES (10)..(10): Citrulline
VQNHSGSSAXGNLSGK

SEQ ID NO: 6626 - protein, 16 aa, Artificial Sequence
  source: /note="Description of Artificial Sequence: Synthetic peptide"
  MOD_RES (6)..(6): Citrulline
SGSSAXGNLSGKPDDW

SEQ ID NO: 6627 - protein, 16 aa, Artificial Sequence
  source: /note="Description of Artificial Sequence: Synthetic peptide"
  MOD_RES (6)..(6): Citrulline
  MOD_RES (13)..(13): Citrulline
SLHPPXGAGSATXGGG

SEQ ID NO: 6628 - protein, 16 aa, Artificial Sequence
  source: /note="Description of Artificial Sequence: Synthetic peptide"
  MOD_RES (2)..(2): Citrulline
  MOD_RES (9)..(9): Citrulline
PXGAGSATXGGGAPSQ

SEQ ID NO: 6629 - protein, 16 aa, Artificial Sequence
  source: /note="Description of Artificial Sequence: Synthetic peptide"
  MOD_RES (5)..(5): Citrulline
  MOD_RES (13)..(13): Citrulline
GSATXGGGAPSQXGTP

SEQ ID NO: 6630 - protein, 16 aa, Artificial Sequence
  source: /note="Description of Artificial Sequence: Synthetic peptide"
  MOD_RES (1)..(1): Citrulline
  MOD_RES (9)..(9): Citrulline
XGGGAPSQXGTPGAGG

SEQ ID NO: 6631 - protein, 16 aa, Artificial Sequence
  source: /note="Description of Artificial Sequence: Synthetic peptide"
  MOD_RES (9)..(9): Citrulline
  MOD_RES (12)..(12): Citrulline
VPITHLDLXGNXLKTL

SEQ ID NO: 6632 - protein, 16 aa, Artificial Sequence
  source: /note="Description of Artificial Sequence: Synthetic peptide"
  MOD_RES (5)..(5): Citrulline
  MOD_RES (8)..(8): Citrulline
HLDLXGNXLKTLPYEE

SEQ ID NO: 6633 - protein, 16 aa, Artificial Sequence
  source: /note="Description of Artificial Sequence: Synthetic peptide"
  MOD_RES (1)..(1): Citrulline
  MOD_RES (4)..(4): Citrulline
XGNXLKTLPYEEVLEQ

SEQ ID NO: 6634 - protein, 16 aa, Artificial Sequence
  source: /note="Description of Artificial Sequence: Synthetic peptide"
  MOD_RES (2)..(2): Citrulline
  MOD_RES (9)..(9): Citrulline
SXSIEDLHXGSNLPSP

SEQ ID NO: 6635 - protein, 16 aa, Artificial Sequence
  source: /note="Description of Artificial Sequence: Synthetic peptide"
  MOD_RES (5)..(5): Citrulline
EDLHXGSNLPSPVGNS

SEQ ID NO: 6636 - protein, 16 aa, Artificial Sequence
  source: /note="Description of Artificial Sequence: Synthetic peptide"
  MOD_RES (1)..(1): Citrulline
  MOD_RES (15)..(15): Citrulline
XGSNLPSPVGNSVSXS

SEQ ID NO: 6637 - protein, 16 aa, Artificial Sequence
  source: /note="Description of Artificial Sequence: Synthetic peptide"
  MOD_RES (13)..(13): Citrulline
MEMTEMTGVSLKXGAL

SEQ ID NO: 6638 - protein, 16 aa, Artificial Sequence
  source: /note="Description of Artificial Sequence: Synthetic peptide"
  MOD_RES (9)..(9): Citrulline
EMTGVSLKXGALVVED

SEQ ID NO: 6639 - protein, 16 aa, Artificial Sequence
  source: /note="Description of Artificial Sequence: Synthetic peptide"
  MOD_RES (5)..(5): Citrulline
VSLKXGALVVEDNDSG

SEQ ID NO: 6640 - protein, 16 aa, Artificial Sequence
  source: /note="Description of Artificial Sequence: Synthetic peptide"
  MOD_RES (10)..(11): Citrulline
VPCSGNFTQXXGTILS

SEQ ID NO: 6641 - protein, 16 aa, Artificial Sequence
  source: /note="Description of Artificial Sequence: Synthetic peptide"
  MOD_RES (6)..(7): Citrulline
GNFTQXXGTILSPGYP

SEQ ID NO: 6642 - protein, 16 aa, Artificial Sequence
  source: /note="Description of Artificial Sequence: Synthetic peptide"
  MOD_RES (2)..(3): Citrulline
QXXGTILSPGYPEPYG

SEQ ID NO: 6643 - protein, 16 aa, Artificial Sequence
  source: /note="Description of Artificial Sequence: Synthetic peptide"
  MOD_RES (11)..(11): Citrulline
TYGAVVHYSCXGSESL

SEQ ID NO: 6644 - protein, 16 aa, Artificial Sequence
  source: /note="Description of Artificial Sequence: Synthetic peptide"
  MOD_RES (7)..(7): Citrulline
VVHYSCXGSESLIGND

SEQ ID NO: 6645 - protein, 16 aa, Artificial Sequence
  source: /note="Description of Artificial Sequence: Synthetic peptide"
  MOD_RES (14)..(14): Citrulline
PGYSLSLDPKDFSXGT

SEQ ID NO: 6646 - protein, 16 aa, Artificial Sequence
  source: /note="Description of Artificial Sequence: Synthetic peptide"
  MOD_RES (10)..(10): Citrulline
  MOD_RES (14)..(14): Citrulline
LSLDPKDFSXGTHXGW

SEQ ID NO: 6647 - protein, 16 aa, Artificial Sequence
  source: /note="Description of Artificial Sequence: Synthetic peptide"
  MOD_RES (6)..(6): Citrulline
  MOD_RES (10)..(10): Citrulline
PKDFSXGTHXGWAAVQ

SEQ ID NO: 6648 - protein, 16 aa, Artificial Sequence
  source: /note="Description of Artificial Sequence: Synthetic peptide"
  MOD_RES (12)..(12): Citrulline
STGLTGAVNVAXGSIQ

SEQ ID NO: 6649 - protein, 16 aa, Artificial Sequence
  source: /note="Description of Artificial Sequence: Synthetic peptide"
  MOD_RES (8)..(8): Citrulline
TGAVNVAXGSIQTGVD

SEQ ID NO: 6650 - protein, 16 aa, Artificial Sequence
  source: /note="Description of Artificial Sequence: Synthetic peptide"
  MOD_RES (4)..(4): Citrulline
NVAXGSIQTGVDTSKT

SEQ ID NO: 6651 - protein, 16 aa, Artificial Sequence
  source: /note="Description of Artificial Sequence: Synthetic peptide"
  MOD_RES (14)..(14): Citrulline
TVCSGVTGAMNLAXGT

SEQ ID NO: 6652 - protein, 16 aa, Artificial Sequence
  source: /note="Description of Artificial Sequence: Synthetic peptide"
  MOD_RES (10)..(10): Citrulline
GVTGAMNLAXGTIQTG

SEQ ID NO: 6653 - protein, 16 aa, Artificial Sequence
  source: /note="Description of Artificial Sequence: Synthetic peptide"
  MOD_RES (6)..(6): Citrulline
AMNLAXGTIQTGVDTT

SEQ ID NO: 6654 - protein, 16 aa, Artificial Sequence
  source: /note="Description of Artificial Sequence: Synthetic peptide"
  MOD_RES (1)..(1): Citrulline
  MOD_RES (8)..(8): Citrulline
XDMDLNYXGMLIPEEN

SEQ ID NO: 6655 - protein, 16 aa, Artificial Sequence
  source: /note="Description of Artificial Sequence: Synthetic peptide"
  MOD_RES (4)..(4): Citrulline
LNYXGMLIPEENIATM

SEQ ID NO: 6656 - protein, 16 aa, Artificial Sequence
  source: /note="Description of Artificial Sequence: Synthetic peptide"
  MOD_RES (10)..(10): Citrulline
  MOD_RES (16)..(16): Citrulline
SCSMTSFHPXGLQAAX

SEQ ID NO: 6657 - protein, 16 aa, Artificial Sequence
  source: /note="Description of Artificial Sequence: Synthetic peptide"
  MOD_RES (6)..(6): Citrulline
  MOD_RES (12)..(12): Citrulline
TSFHPXGLQAAXAQKF

SEQ ID NO: 6658 - protein, 16 aa, Artificial Sequence
  source: /note="Description of Artificial Sequence: Synthetic peptide"
  MOD_RES (9)..(9): Citrulline
WLSGKPHGXGVLKWPD

SEQ ID NO: 6659 - protein, 16 aa, Artificial Sequence
  source: /note="Description of Artificial Sequence: Synthetic peptide"
  MOD_RES (5)..(5): Citrulline
KPHGXGVLKWPDGKMY

SEQ ID NO: 6660 - protein, 16 aa, Artificial Sequence
  source: /note="Description of Artificial Sequence: Synthetic peptide"
  MOD_RES (11)..(11): Citrulline
AGYGVFDDITXGEKYM

SEQ ID NO: 6661 - protein, 16 aa, Artificial Sequence
  source: /note="Description of Artificial Sequence: Synthetic peptide"
  MOD_RES (7)..(7): Citrulline
VFDDITXGEKYMGMWQ

SEQ ID NO: 6662 - protein, 16 aa, Artificial Sequence
  source: /note="Description of Artificial Sequence: Synthetic peptide"
  MOD_RES (3)..(3): Citrulline
ITXGEKYMGMWQDDVC

SEQ ID NO: 6663 - protein, 16 aa, Artificial Sequence
  source: /note="Description of Artificial Sequence: Synthetic peptide"
  MOD_RES (13)..(13): Citrulline
AWDLEQTVTKLTXGGL

SEQ ID NO: 6664 - protein, 16 aa, Artificial Sequence
  source: /note="Description of Artificial Sequence: Synthetic peptide"
  MOD_RES (9)..(9): Citrulline
EQTVTKLTXGGLSAEE

SEQ ID NO: 6665 - protein, 16 aa, Artificial Sequence
  source: /note="Description of Artificial Sequence: Synthetic peptide"
  MOD_RES (11)..(11): Citrulline
TMVNSSNYLDXGILKA

SEQ ID NO: 6666 - protein, 16 aa, Artificial Sequence
  source: /note="Description of Artificial Sequence: Synthetic peptide"
  MOD_RES (7)..(7): Citrulline
SSNYLDXGILKAYSDS

SEQ ID NO: 6667 - protein, 16 aa, Artificial Sequence
  source: /note="Description of Artificial Sequence: Synthetic peptide"
  MOD_RES (3)..(3): Citrulline
  MOD_RES (8)..(8): Citrulline
LLXPPNLXGSSLPGKP

SEQ ID NO: 6668 - protein, 16 aa, Artificial Sequence
  source: /note="Description of Artificial Sequence: Synthetic peptide"
  MOD_RES (4)..(4): Citrulline
PNLXGSSLPGKPTSPH

SEQ ID NO: 6669 - protein, 16 aa, Artificial Sequence
  source: /note="Description of Artificial Sequence: Synthetic peptide"
  MOD_RES (8)..(8): Citrulline
QSVCIQIXGQILQKLG

SEQ ID NO: 6670 - protein, 16 aa, Artificial Sequence
  source: /note="Description of Artificial Sequence: Synthetic peptide"
  MOD_RES (4)..(4): Citrulline
IQIXGQILQKLGMWYE

SEQ ID NO: 6671 - protein, 16 aa, Artificial Sequence
  source: /note="Description of Artificial Sequence: Synthetic peptide"
  MOD_RES (10)..(10): Citrulline
PEAVTSIKKXGESLGY

SEQ ID NO: 6672 - protein, 16 aa, Artificial Sequence
  source: /note="Description of Artificial Sequence: Synthetic peptide"
  MOD_RES (6)..(6): Citrulline
TSIKKXGESLGYTEGA

SEQ ID NO: 6673 - protein, 16 aa, Artificial Sequence
  source: /note="Description of Artificial Sequence: Synthetic peptide"
  MOD_RES (11)..(11): Citrulline
NENTGICTNKXGSSNP

SEQ ID NO: 6674 - protein, 16 aa, Artificial Sequence
  source: /note="Description of Artificial Sequence: Synthetic peptide"
  MOD_RES (7)..(7): Citrulline
GICTNKXGSSNPLLTT

SEQ ID NO: 6675 - protein, 16 aa, Artificial Sequence
  source: /note="Description of Artificial Sequence: Synthetic peptide"
  MOD_RES (9)..(9): Citrulline
DFYTVELEXGAKGFGF

SEQ ID NO: 6676 - protein, 16 aa, Artificial Sequence
  source: /note="Description of Artificial Sequence: Synthetic peptide"
  MOD_RES (5)..(5): Citrulline
  MOD_RES (15)..(15): Citrulline
VELEXGAKGFGFSLXG

SEQ ID NO: 6677 - protein, 16 aa, Artificial Sequence
  source: /note="Description of Artificial Sequence: Synthetic peptide"
  MOD_RES (7)..(7): Citrulline
  MOD_RES (10)..(10): Citrulline
QDLASMXEFXGLLKDA

SEQ ID NO: 6678 - protein, 16 aa, Artificial Sequence
  source: /note="Description of Artificial Sequence: Synthetic peptide"
  MOD_RES (3)..(3): Citrulline
  MOD_RES (6)..(6): Citrulline
SMXEFXGLLKDAQTQL

SEQ ID NO: 6679 - protein, 16 aa, Artificial Sequence
  source: /note="Description of Artificial Sequence: Synthetic peptide"
  MOD_RES (13)..(13): Citrulline
SAVTPKVMAGFLXGDK

SEQ ID NO: 6680 - protein, 16 aa, Artificial Sequence
  source: /note="Description of Artificial Sequence: Synthetic peptide"
  MOD_RES (9)..(9): Citrulline
PKVMAGFLXGDKVISY

SEQ ID NO: 6681 - protein, 16 aa, Artificial Sequence
  source: /note="Description of Artificial Sequence: Synthetic peptide"
  MOD_RES (9)..(9): Citrulline
  MOD_RES (12)..(12): Citrulline
GWLEGVNSXGDXGLFP

SEQ ID NO: 6682 - protein, 16 aa, Artificial Sequence
  source: /note="Description of Artificial Sequence: Synthetic peptide"
  MOD_RES (5)..(5): Citrulline
  MOD_RES (8)..(8): Citrulline
GVNSXGDXGLFPASYV

SEQ ID NO: 6683 - protein, 16 aa, Artificial Sequence
  source: /note="Description of Artificial Sequence: Synthetic peptide"
  MOD_RES (9)..(9): Citrulline
  MOD_RES (11)..(11): Citrulline
GPGLDSGLXPXGAPLG

SEQ ID NO: 6684 - protein, 16 aa, Artificial Sequence
  source: /note="Description of Artificial Sequence: Synthetic peptide"
  MOD_RES (5)..(5): Citrulline
  MOD_RES (7)..(7): Citrulline
DSGLXPXGAPLGPPPP

SEQ ID NO: 6685 - protein, 16 aa, Artificial Sequence
  source: /note="Description of Artificial Sequence: Synthetic peptide"
  MOD_RES (11)..(11): Citrulline
QCGKPQESTGXGSAFL

SEQ ID NO: 6686 - protein, 16 aa, Artificial Sequence
  source: /note="Description of Artificial Sequence: Synthetic peptide"
  MOD_RES (7)..(7): Citrulline
PQESTGXGSAFLKAVQ

SEQ ID NO: 6687 - protein, 16 aa, Artificial Sequence
  source: /note="Description of Artificial Sequence: Synthetic peptide"
  MOD_RES (5)..(5): Citrulline
  MOD_RES (10)..(10): Citrulline
PAGFXEGITXGGKGLV

SEQ ID NO: 6688 - protein, 16 aa, Artificial Sequence
  source: /note="Description of Artificial Sequence: Synthetic peptide"
  MOD_RES (1)..(1): Citrulline
  MOD_RES (6)..(6): Citrulline
XEGITXGGKGLVSGFV

SEQ ID NO: 6689 - protein, 16 aa, Artificial Sequence
  source: /note="Description of Artificial Sequence: Synthetic peptide"
  MOD_RES (9)..(9): Citrulline
FSPGGSGLXGLKLLEA

SEQ ID NO: 6690 - protein, 16 aa, Artificial Sequence
  source: /note="Description of Artificial Sequence: Synthetic peptide"
  MOD_RES (5)..(5): Citrulline
GSGLXGLKLLEAKCQG

SEQ ID NO: 6691 - protein, 16 aa, Artificial Sequence
  source: /note="Description of Artificial Sequence: Synthetic peptide"
  MOD_RES (4)..(4): Citrulline
  MOD_RES (13)..(13): Citrulline
PAPXGGGGSALVXGSP

SEQ ID NO: 6692 - protein, 16 aa, Artificial Sequence
  source: /note="Description of Artificial Sequence: Synthetic peptide"
  MOD_RES (9)..(9): Citrulline
GGGGSALVXGSPCVES

SEQ ID NO: 6693 - protein, 16 aa, Artificial Sequence
  source: /note="Description of Artificial Sequence: Synthetic peptide"
  MOD_RES (1)..(1): Citrulline
  MOD_RES (11)..(11): Citrulline
XGPALLFPATXGVPAK

SEQ ID NO: 6694 - protein, 16 aa, Artificial Sequence
  source: /note="Description of Artificial Sequence: Synthetic peptide"
  MOD_RES (7)..(7): Citrulline
  MOD_RES (13)..(13): Citrulline
LLFPATXGVPAKXLLD

SEQ ID NO: 6695 - protein, 16 aa, Artificial Sequence
  source: /note="Description of Artificial Sequence: Synthetic peptide"
  MOD_RES (12)..(12): Citrulline
LSGSTSMTFLNXGQII

SEQ ID NO: 6696 - protein, 16 aa, Artificial Sequence
  source: /note="Description of Artificial Sequence: Synthetic peptide"
  MOD_RES (8)..(8): Citrulline
TSMTFLNXGQIIDIES

SEQ ID NO: 6697 - protein, 16 aa, Artificial Sequence
  source: /note="Description of Artificial Sequence: Synthetic peptide"
  MOD_RES (4)..(4): Citrulline
FLNXGQIIDIESAQIS

SEQ ID NO: 6698 - protein, 16 aa, Artificial Sequence
  source: /note="Description of Artificial Sequence: Synthetic peptide"
  MOD_RES (10)..(10): Citrulline
  MOD_RES (12)..(12): Citrulline
VQACPGGPQXAXGSVI

SEQ ID NO: 6699 - protein, 16 aa, Artificial Sequence
  source: /note="Description of Artificial Sequence: Synthetic peptide"
  MOD_RES (6)..(6): Citrulline
  MOD_RES (8)..(8): Citrulline
PGGPQXAXGSVIGNIN

SEQ ID NO: 6700 - protein, 16 aa, Artificial Sequence
  source: /note="Description of Artificial Sequence: Synthetic peptide"
  MOD_RES (2)..(2): Citrulline
  MOD_RES (4)..(4): Citrulline
QXAXGSVIGNINDVEF

SEQ ID NO: 6701 - protein, 16 aa, Artificial Sequence
  source: /note="Description of Artificial Sequence: Synthetic peptide"
  MOD_RES (9)..(9): Citrulline
PDQHCKNTXGGYKCID

SEQ ID NO: 6702 - protein, 16 aa, Artificial Sequence
  source: /note="Description of Artificial Sequence: Synthetic peptide"
  MOD_RES (5)..(5): Citrulline
CKNTXGGYKCIDLCPN

SEQ ID NO: 6703 - protein, 16 aa, Artificial Sequence
  source: /note="Description of Artificial Sequence: Synthetic peptide"
  MOD_RES (7)..(7): Citrulline
FDHVFSXGLKKSSQEL

SEQ ID NO: 6704 - protein, 16 aa, Artificial Sequence
  source: /note="Description of Artificial Sequence: Synthetic peptide"
  MOD_RES (3)..(3): Citrulline
FSXGLKKSSQELYGLI

SEQ ID NO: 6705 - protein, 16 aa, Artificial Sequence
  source: /note="Description of Artificial Sequence: Synthetic peptide"
  MOD_RES (10)..(10): Citrulline
GIQSGQGTAXGQVKCP

SEQ ID NO: 6706 - protein, 16 aa, Artificial Sequence
  source: /note="Description of Artificial Sequence: Synthetic peptide"
  MOD_RES (6)..(6): Citrulline
  MOD_RES (13)..(13): Citrulline
GQGTAXGQVKCPXSGA

SEQ ID NO: 6707 - protein, 16 aa, Artificial Sequence
  source: /note="Description of Artificial Sequence: Synthetic peptide"
  MOD_RES (2)..(2): Citrulline
  MOD_RES (9)..(9): Citrulline
AXGQVKCPXSGAEGKG

SEQ ID NO: 6708 - protein, 16 aa, Artificial Sequence
  source: /note="Description of Artificial Sequence: Synthetic peptide"
  MOD_RES (11)..(11): Citrulline
  MOD_RES (15)..(15): Citrulline
SILSNSSVTGXGSFXP

SEQ ID NO: 6709 - protein, 16 aa, Artificial Sequence
  source: /note="Description of Artificial Sequence: Synthetic peptide"
  MOD_RES (7)..(7): Citrulline
  MOD_RES (11)..(11): Citrulline
NSSVTGXGSFXPIQSS

SEQ ID NO: 6710 - protein, 16 aa, Artificial Sequence
  source: /note="Description of Artificial Sequence: Synthetic peptide"
  MOD_RES (11)..(11): Citrulline
SPQDSSSFESXGSDGG

SEQ ID NO: 6711 - protein, 16 aa, Artificial Sequence
  source: /note="Description of Artificial Sequence: Synthetic peptide"
  MOD_RES (7)..(7): Citrulline
SSSFESXGSDGGSMLK

SEQ ID NO: 6712 - protein, 16 aa, Artificial Sequence
  source: /note="Description of Artificial Sequence: Synthetic peptide"
  MOD_RES (10)..(10): Citrulline
  MOD_RES (12)..(12): Citrulline
AATVATALLXTXGQPS

SEQ ID NO: 6713 - protein, 16 aa, Artificial Sequence
  source: /note="Description of Artificial Sequence: Synthetic peptide"
  MOD_RES (6)..(6): Citrulline
  MOD_RES (8)..(8): Citrulline
ATALLXTXGQPSSPSP

SEQ ID NO: 6714 - protein, 16 aa, Artificial Sequence
  source: /note="Description of Artificial Sequence: Synthetic peptide"
  MOD_RES (2)..(2): Citrulline
  MOD_RES (4)..(4): Citrulline
LXTXGQPSSPSPLAYM

SEQ ID NO: 6715 - protein, 16 aa, Artificial Sequence
  source: /note="Description of Artificial Sequence: Synthetic peptide"
  MOD_RES (7)..(7): Citrulline
  MOD_RES (13)..(13): Citrulline
STYSPAXGVAGPXGQD

SEQ ID NO: 6716 - protein, 16 aa, Artificial Sequence
  source: /note="Description of Artificial Sequence: Synthetic peptide"
  MOD_RES (3)..(3): Citrulline
  MOD_RES (9)..(9): Citrulline
PAXGVAGPXGQDPVSS

SEQ ID NO: 6717 - protein, 16 aa, Artificial Sequence
  source: /note="Description of Artificial Sequence: Synthetic peptide"
  MOD_RES (9)..(9): Citrulline
IEEAKAQAXGLLPGGT

SEQ ID NO: 6718 - protein, 16 aa, Artificial Sequence
  source: /note="Description of Artificial Sequence: Synthetic peptide"
  MOD_RES (5)..(5): Citrulline
KAQAXGLLPGGTQVLD

SEQ ID NO: 6719 - protein, 16 aa, Artificial Sequence
  source: /note="Description of Artificial Sequence: Synthetic peptide"
  MOD_RES (4)..(4): Citrulline
  MOD_RES (10)..(10): Citrulline
LGGXAVATNXGSSLKG

SEQ ID NO: 6720 - protein, 16 aa, Artificial Sequence
  source: /note="Description of Artificial Sequence: Synthetic peptide"
  MOD_RES (6)..(6): Citrulline
AVATNXGSSLKGFVKD

SEQ ID NO: 6721 - protein, 16 aa, Artificial Sequence
  source: /note="Description of Artificial Sequence: Synthetic peptide"
  MOD_RES (2)..(2): Citrulline
NXGSSLKGFVKDGQNS

SEQ ID NO: 6722 - protein, 16 aa, Artificial Sequence
  source: /note="Description of Artificial Sequence: Synthetic peptide"
  MOD_RES (10)..(10): Citrulline
AYSAAAAHSXGLAFMA

SEQ ID NO: 6723 - protein, 16 aa, Artificial Sequence
  source: /note="Description of Artificial Sequence: Synthetic peptide"
  MOD_RES (6)..(6): Citrulline
AAAHSXGLAFMAPYST

SEQ ID NO: 6724 - protein, 16 aa, Artificial Sequence
  source: /note="Description of Artificial Sequence: Synthetic peptide"
  MOD_RES (8)..(8): Citrulline
  MOD_RES (10)..(10): Citrulline
SFGLGPHXGXLNIQSG

SEQ ID NO: 6725 - protein, 16 aa, Artificial Sequence
  source: /note="Description of Artificial Sequence: Synthetic peptide"
  MOD_RES (2)..(2): Citrulline
  MOD_RES (9)..(9): Citrulline
SXLKEQLAXGAEKAQE

SEQ ID NO: 6726 - protein, 16 aa, Artificial Sequence
  source: /note="Description of Artificial Sequence: Synthetic peptide"
  MOD_RES (7)..(7): Citrulline
  MOD_RES (9)..(9): Citrulline
LALSGTXAXGHLPPGP

SEQ ID NO: 6727 - protein, 16 aa, Artificial Sequence
  source: /note="Description of Artificial Sequence: Synthetic peptide"
  MOD_RES (3)..(3): Citrulline
  MOD_RES (5)..(5): Citrulline
GTXAXGHLPPGPTPLP

SEQ ID NO: 6728 - protein, 16 aa, Artificial Sequence
  source: /note="Description of Artificial Sequence: Synthetic peptide"
  MOD_RES (8)..(8): Citrulline
PDLLFAQXGDLSDVEE

SEQ ID NO: 6729 - protein, 16 aa, Artificial Sequence
  source: /note="Description of Artificial Sequence: Synthetic peptide"
  MOD_RES (4)..(4): Citrulline
  MOD_RES (6)..(6): Citrulline
GCVXLXGAVIGIDDED

SEQ ID NO: 6730 - protein, 16 aa, Artificial Sequence
  source: /note="Description of Artificial Sequence: Synthetic peptide"
  MOD_RES (2)..(2): Citrulline
LXGAVIGIDDEDDSTF

SEQ ID NO: 6731 - protein, 16 aa, Artificial Sequence
  source: /note="Description of Artificial Sequence: Synthetic peptide"
  MOD_RES (11)..(11): Citrulline
  MOD_RES (15)..(15): Citrulline
LVTDGCLGIGXGSLXH

SEQ ID NO: 6732 - protein, 16 aa, Artificial Sequence
  source: /note="Description of Artificial Sequence: Synthetic peptide"
  MOD_RES (7)..(7): Citrulline
  MOD_RES (11)..(11): Citrulline
GCLGIGXGSLXHSLAT

SEQ ID NO: 6733 - protein, 16 aa, Artificial Sequence
  source: /note="Description of Artificial Sequence: Synthetic peptide"
  MOD_RES (10)..(10): Citrulline
  MOD_RES (13)..(13): Citrulline
EASLVEKVKXGQXTAT

SEQ ID NO: 6734 - protein, 16 aa, Artificial Sequence
  source: /note="Description of Artificial Sequence: Synthetic peptide"
  MOD_RES (6)..(6): Citrulline
  MOD_RES (9)..(9): Citrulline
VEKVKXGQXTATSLPV

SEQ ID NO: 6735 - protein, 16 aa, Artificial Sequence
  source: /note="Description of Artificial Sequence: Synthetic peptide"
  MOD_RES (4)..(4): Citrulline
  MOD_RES (15)..(15): Citrulline
GVGXGKDISTITGHXG

SEQ ID NO: 6736 - protein, 16 aa, Artificial Sequence
  source: /note="Description of Artificial Sequence: Synthetic peptide"
  MOD_RES (11)..(11): Citrulline
GKDISTITGHXGKDIS

SEQ ID NO: 6737 - protein, 16 aa, Artificial Sequence
  source: /note="Description of Artificial Sequence: Synthetic peptide"
  MOD_RES (10)..(10): Citrulline
  MOD_RES (14)..(14): Citrulline
SLHLDKSSSXGGSXEY

SEQ ID NO: 6738 - protein, 16 aa, Artificial Sequence
  source: /note="Description of Artificial Sequence: Synthetic peptide"
  MOD_RES (6)..(6): Citrulline
  MOD_RES (10)..(10): Citrulline
DKSSSXGGSXEYDTGG

SEQ ID NO: 6739 - protein, 16 aa, Artificial Sequence
  source: /note="Description of Artificial Sequence: Synthetic peptide"
  MOD_RES (1)..(1): Citrulline
  MOD_RES (7)..(7): Citrulline
XGSTAAXGVQVTPQDF

SEQ ID NO: 6740 - protein, 16 aa, Artificial Sequence
  source: /note="Description of Artificial Sequence: Synthetic peptide"
  MOD_RES (3)..(3): Citrulline
AAXGVQVTPQDFPISK

SEQ ID NO: 6741 - protein, 16 aa, Artificial Sequence
  source: /note="Description of Artificial Sequence: Synthetic peptide"
  MOD_RES (2)..(2): Citrulline
  MOD_RES (7)..(7): Citrulline
KXSNSPXGEAQKLLEL

SEQ ID NO: 6742 - protein, 16 aa, Artificial Sequence
  source: /note="Description of Artificial Sequence: Synthetic peptide"
  MOD_RES (3)..(3): Citrulline
SPXGEAQKLLELKMEA

SEQ ID NO: 6743 - protein, 16 aa, Artificial Sequence
  source: /note="Description of Artificial Sequence: Synthetic peptide"
  MOD_RES (8)..(8): Citrulline
TNQMSIGXGKLPAEEF

SEQ ID NO: 6744 - protein, 16 aa, Artificial Sequence
  source: /note="Description of Artificial Sequence: Synthetic peptide"
  MOD_RES (4)..(4): Citrulline
SIGXGKLPAEEFKAKV

SEQ ID NO: 6745 - protein, 16 aa, Artificial Sequence
  source: /note="Description of Artificial Sequence: Synthetic peptide"
  MOD_RES (9)..(9): Citrulline
  MOD_RES (12)..(12): Citrulline
MGDQKVSSXGTXLVFP

SEQ ID NO: 6746 - protein, 16 aa, Artificial Sequence
  source: /note="Description of Artificial Sequence: Synthetic peptide"
  MOD_RES (5)..(5): Citrulline
  MOD_RES (8)..(8): Citrulline
KVSSXGTXLVFPLEDN

SEQ ID NO: 6747 - protein, 13 aa, Artificial Sequence
  source: /note="Description of Artificial Sequence: Synthetic peptide"
  MOD_RES (1)..(1): Citrulline
  MOD_RES (4)..(4): Citrulline
XGTXLVFPLEDNA

SEQ ID NO: 6748 - protein, 16 aa, Artificial Sequence
  source: /note="Description of Artificial Sequence: Synthetic peptide"
  MOD_RES (4)..(4): Citrulline
  MOD_RES (8)..(8): Citrulline
GLQXLFYXGKQMEDGH

SEQ ID NO: 6749 - protein, 16 aa, Artificial Sequence
  source: /note="Description of Artificial Sequence: Synthetic peptide"
  MOD_RES (8)..(8): Citrulline
VDPEIIAXGTVGFSGA

SEQ ID NO: 6750 - protein, 16 aa, Artificial Sequence
  source: /note="Description of Artificial Sequence: Synthetic peptide"
  MOD_RES (4)..(4): Citrulline
IIAXGTVGFSGAELEN

SEQ ID NO: 6751 - protein, 16 aa, Artificial Sequence
  source: /note="Description of Artificial Sequence: Synthetic peptide"
  MOD_RES (11)..(11): Citrulline
DLNHKTQENYXGGLQS

SEQ ID NO: 6752 - protein, 16 aa, Artificial Sequence
  source: /note="Description of Artificial Sequence: Synthetic peptide"
  MOD_RES (7)..(7): Citrulline
KTQENYXGGLQSQSGT

SEQ ID NO: 6753 - protein, 16 aa, Artificial Sequence
  source: /note="Description of Artificial Sequence: Synthetic peptide"
  MOD_RES (10)..(10): Citrulline
  MOD_RES (12)..(12): Citrulline
SQKDIKVSSXGXTSST

SEQ ID NO: 6754 - protein, 16 aa, Artificial Sequence
  source: /note="Description of Artificial Sequence: Synthetic peptide"
  MOD_RES (6)..(6): Citrulline
  MOD_RES (8)..(8): Citrulline
IKVSSXGXTSSTNEDE

SEQ ID NO: 6755 - protein, 16 aa, Artificial Sequence
  source: /note="Description of Artificial Sequence: Synthetic peptide"
  MOD_RES (5)..(5): Citrulline
  MOD_RES (7)..(7): Citrulline
LFSFXGXAKDIGSEND

SEQ ID NO: 6756 - protein, 16 aa, Artificial Sequence
  source: /note="Description of Artificial Sequence: Synthetic peptide"
  MOD_RES (8)..(8): Citrulline
ILIKCNEXGKIIPADF

SEQ ID NO: 6757 - protein, 16 aa, Artificial Sequence
  source: /note="Description of Artificial Sequence: Synthetic peptide"
  MOD_RES (4)..(4): Citrulline
CNEXGKIIPADFEAKI

SEQ ID NO: 6758 - protein, 16 aa, Artificial Sequence
  source: /note="Description of Artificial Sequence: Synthetic peptide"
  MOD_RES (1)..(1): Citrulline
  MOD_RES (12)..(12): Citrulline
XNAVLEADFAKXGYKL

SEQ ID NO: 6759 - protein, 16 aa, Artificial Sequence
  source: /note="Description of Artificial Sequence: Synthetic peptide"
  MOD_RES (8)..(8): Citrulline
  MOD_RES (16)..(16): Citrulline
LEADFAKXGYKLPKVX

SEQ ID NO: 6760 - protein, 16 aa, Artificial Sequence
  source: /note="Description of Artificial Sequence: Synthetic peptide"
  MOD_RES (6)..(6): Citrulline
  MOD_RES (12)..(12): Citrulline
LENKIXEWYETXGTGT

SEQ ID NO: 6761 - protein, 16 aa, Artificial Sequence
  source: /note="Description of Artificial Sequence: Synthetic peptide"
  MOD_RES (2)..(2): Citrulline
  MOD_RES (8)..(8): Citrulline
IXEWYETXGTGTADAS

SEQ ID NO: 6762 - protein, 16 aa, Artificial Sequence
  source: /note="Description of Artificial Sequence: Synthetic peptide"
  MOD_RES (4)..(4): Citrulline
YETXGTGTADASQSDY

SEQ ID NO: 6763 - protein, 16 aa, Artificial Sequence
  source: /note="Description of Artificial Sequence: Synthetic peptide"
  MOD_RES (10)..(10): Citrulline
TTCANPPSLXGVKLSD

SEQ ID NO: 6764 - protein, 16 aa, Artificial Sequence
  source: /note="Description of Artificial Sequence: Synthetic peptide"
  MOD_RES (6)..(6): Citrulline
NPPSLXGVKLSDVKLS

SEQ ID NO: 6765 - protein, 16 aa, Artificial Sequence
  source: /note="Description of Artificial Sequence: Synthetic peptide"
  MOD_RES (7)..(7): Citrulline
  MOD_RES (9)..(9): Citrulline
DSNSYWXIXGKSATVC

SEQ ID NO: 6766 - protein, 16 aa, Artificial Sequence
  source: /note="Description of Artificial Sequence: Synthetic peptide"
  MOD_RES (1)..(1): Citrulline
  MOD_RES (10)..(10): Citrulline
XGKSATVCEXGTPIKC

SEQ ID NO: 6767 - protein, 16 aa, Artificial Sequence
  source: /note="Description of Artificial Sequence: Synthetic peptide"
  MOD_RES (6)..(6): Citrulline
ATVCEXGTPIKCGQPI

SEQ ID NO: 6768 - protein, 16 aa, Artificial Sequence
  source: /note="Description of Artificial Sequence: Synthetic peptide"
  MOD_RES (13)..(13): Citrulline
GNLIGKFFSTETXGSL

SEQ ID NO: 6769 - protein, 16 aa, Artificial Sequence
  source: /note="Description of Artificial Sequence: Synthetic peptide"
  MOD_RES (9)..(9): Citrulline
GKFFSTETXGSLDPYE

SEQ ID NO: 6770 - protein, 16 aa, Artificial Sequence
  source: /note="Description of Artificial Sequence: Synthetic peptide"
  MOD_RES (5)..(5): Citrulline
STETXGSLDPYEGQEV

SEQ ID NO: 6771 - protein, 16 aa, Artificial Sequence
  source: /note="Description of Artificial Sequence: Synthetic peptide"
  MOD_RES (12)..(12): Citrulline
QLAGDSKIFPVXGQVL

SEQ ID NO: 6772 - protein, 16 aa, Artificial Sequence
  source: /note="Description of Artificial Sequence: Synthetic peptide"
  MOD_RES (8)..(8): Citrulline
DSKIFPVXGQVLQVQA

SEQ ID NO: 6773 - protein, 16 aa, Artificial Sequence
  source: /note="Description of Artificial Sequence: Synthetic peptide"
  MOD_RES (3)..(3): Citrulline
  MOD_RES (6)..(6): Citrulline
MNXLQXGKKQQIENGS

SEQ ID NO: 6774 - protein, 16 aa, Artificial Sequence
  source: /note="Description of Artificial Sequence: Synthetic peptide"
  MOD_RES (2)..(2): Citrulline
QXGKKQQIENGSGAED

SEQ ID NO: 6775 - protein, 16 aa, Artificial Sequence
  source: /note="Description of Artificial Sequence: Synthetic peptide"
  MOD_RES (2)..(2): Citrulline
  MOD_RES (11)..(11): Citrulline
FXIPLITATPXGTLLA

SEQ ID NO: 6776 - protein, 16 aa, Artificial Sequence
  source: /note="Description of Artificial Sequence: Synthetic peptide"
  MOD_RES (7)..(7): Citrulline
LITATPXGTLLAFAEA

SEQ ID NO: 6777 - protein, 16 aa, Artificial Sequence
  source: /note="Description of Artificial Sequence: Synthetic peptide"
  MOD_RES (3)..(3): Citrulline
  MOD_RES (9)..(9): Citrulline
LLXMKFMQXGLDSETK

SEQ ID NO: 6778 - protein, 16 aa, Artificial Sequence
  source: /note="Description of Artificial Sequence: Synthetic peptide"
  MOD_RES (5)..(5): Citrulline
KFMQXGLDSETKKQLE

SEQ ID NO: 6779 - protein, 16 aa, Artificial Sequence
  source: /note="Description of Artificial Sequence: Synthetic peptide"
  MOD_RES (2)..(2): Citrulline
  MOD_RES (6)..(6): Citrulline
GXMSFXGFNPEVEKLM

SEQ ID NO: 6780 - protein, 16 aa, Artificial Sequence
  source: /note="Description of Artificial Sequence: Synthetic peptide"
  MOD_RES (2)..(2): Citrulline
FXGFNPEVEKLMLQMN

SEQ ID NO: 6781 - protein, 16 aa, Artificial Sequence
  source: /note="Description of Artificial Sequence: Synthetic peptide"
  MOD_RES (8)..(8): Citrulline
  MOD_RES (10)..(10): Citrulline
SWNMVLAXGXPTDTPS

SEQ ID NO: 6782 - protein, 16 aa, Artificial Sequence
  source: /note="Description of Artificial Sequence: Synthetic peptide"
  MOD_RES (4)..(4): Citrulline
  MOD_RES (6)..(6): Citrulline
VLAXGXPTDTPSYFNG

SEQ ID NO: 6783 - protein, 16 aa, Artificial Sequence
  source: /note="Description of Artificial Sequence: Synthetic peptide"
  MOD_RES (10)..(10): Citrulline
  MOD_RES (14)..(14): Citrulline
VISTGVSPSXGSLXTS

SEQ ID NO: 6784 - protein, 16 aa, Artificial Sequence
  source: /note="Description of Artificial Sequence: Synthetic peptide"
  MOD_RES (6)..(6): Citrulline
  MOD_RES (10)..(10): Citrulline
GVSPSXGSLXTSLGSG

SEQ ID NO: 6785 - protein, 16 aa, Artificial Sequence
  source: /note="Description of Artificial Sequence: Synthetic peptide"
  MOD_RES (12)..(12): Citrulline
  MOD_RES (15)..(15): Citrulline
GIEKLVNITKGXGDXS

SEQ ID NO: 6786 - protein, 16 aa, Artificial Sequence
  source: /note="Description of Artificial Sequence: Synthetic peptide"
  MOD_RES (8)..(8): Citrulline
  MOD_RES (11)..(11): Citrulline
LVNITKGXGDXSSLKV

SEQ ID NO: 6787 - protein, 16 aa, Artificial Sequence
  source: /note="Description of Artificial Sequence: Synthetic peptide"
  MOD_RES (5)..(5): Citrulline
  MOD_RES (8)..(8): Citrulline
PFIYXGVXVGGLKESA

SEQ ID NO: 6788 - protein, 16 aa, Artificial Sequence
  source: /note="Description of Artificial Sequence: Synthetic peptide"
  MOD_RES (11)..(11): Citrulline
VENACYALKVXGSEIP

SEQ ID NO: 6789 - protein, 16 aa, Artificial Sequence
  source: /note="Description of Artificial Sequence: Synthetic peptide"
  MOD_RES (7)..(7): Citrulline
CYALKVXGSEIPKHML

SEQ ID NO: 6790 - protein, 16 aa, Artificial Sequence
  source: /note="Description of Artificial Sequence: Synthetic peptide"
  MOD_RES (3)..(3): Citrulline
KVXGSEIPKHMLADVF

SEQ ID NO: 6791 - protein, 16 aa, Artificial Sequence
  source: /note="Description of Artificial Sequence: Synthetic peptide"
  MOD_RES (10)..(10): Citrulline
QPLPTQVVSXGSHNPS

SEQ ID NO: 6792 - protein, 16 aa, Artificial Sequence
  source: /note="Description of Artificial Sequence: Synthetic peptide"
  MOD_RES (6)..(6): Citrulline
TQVVSXGSHNPSLLGN

SEQ ID NO: 6793 - protein, 16 aa, Artificial Sequence
  source: /note="Description of Artificial Sequence: Synthetic peptide"
  MOD_RES (1)..(1): Citrulline
  MOD_RES (8)..(8): Citrulline
XVIEVLPXGATAAVLA

SEQ ID NO: 6794 - protein, 16 aa, Artificial Sequence
  source: /note="Description of Artificial Sequence: Synthetic peptide"
  MOD_RES (4)..(4): Citrulline
VLPXGATAAVLAPDSS

SEQ ID NO: 6795 - protein, 16 aa, Artificial Sequence
  source: /note="Description of Artificial Sequence: Synthetic peptide"
  MOD_RES (12)..(12): Citrulline
NIKTNAKLYCNXGTVN

SEQ ID NO: 6796 - protein, 16 aa, Artificial Sequence
  source: /note="Description of Artificial Sequence: Synthetic peptide"
  MOD_RES (8)..(8): Citrulline
  MOD_RES (16)..(16): Citrulline
NAKLYCNXGTVNSKLX

SEQ ID NO: 6797 - protein, 16 aa, Artificial Sequence
  source: /note="Description of Artificial Sequence: Synthetic peptide"
  MOD_RES (13)..(13): Citrulline
GSNSESWGWDIGXGKL

SEQ ID NO: 6798 - protein, 16 aa, Artificial Sequence
  source: /note="Description of Artificial Sequence: Synthetic peptide"
  MOD_RES (9)..(9): Citrulline
ESWGWDIGXGKLYHQS

SEQ ID NO: 6799 - protein, 16 aa, Artificial Sequence
  source: /note="Description of Artificial Sequence: Synthetic peptide"
  MOD_RES (13)..(13): Citrulline
NLVLNLQDESFTXGSD

SEQ ID NO: 6800 - protein, 16 aa, Artificial Sequence
  source: /note="Description of Artificial Sequence: Synthetic peptide"
  MOD_RES (9)..(9): Citrulline
NLQDESFTXGSDSLIK

SEQ ID NO: 6801 - protein, 16 aa, Artificial Sequence
  source: /note="Description of Artificial Sequence: Synthetic peptide"
  MOD_RES (9)..(9): Citrulline
MEEQVHSIXGSSSANP

SEQ ID NO: 6802 - protein, 16 aa, Artificial Sequence
  source: /note="Description of Artificial Sequence: Synthetic peptide"
  MOD_RES (5)..(5): Citrulline
VHSIXGSSSANPVNSV

SEQ ID NO: 6803 - protein, 16 aa, Artificial Sequence
  source: /note="Description of Artificial Sequence: Synthetic peptide"
  MOD_RES (1)..(1): Citrulline
  MOD_RES (12)..(12): Citrulline
XYDKDVGQWKEXGIGD

SEQ ID NO: 6804 - protein, 16 aa, Artificial Sequence
  source: /note="Description of Artificial Sequence: Synthetic peptide"
  MOD_RES (8)..(8): Citrulline
DVGQWKEXGIGDIKIL

SEQ ID NO: 6805 - protein, 16 aa, Artificial Sequence
  source: /note="Description of Artificial Sequence: Synthetic peptide"
  MOD_RES (10)..(10): Citrulline
NECGKAFSQXGHFMEH

SEQ ID NO: 6806 - protein, 16 aa, Artificial Sequence
  source: /note="Description of Artificial Sequence: Synthetic peptide"
  MOD_RES (6)..(6): Citrulline
KAFSQXGHFMEHQKIH

SEQ ID NO: 6807 - protein, 16 aa, Artificial Sequence
  source: /note="Description of Artificial Sequence: Synthetic peptide"
  MOD_RES (2)..(2): Citrulline
QXGHFMEHQKIHTGEK

SEQ ID NO: 6808 - protein, 16 aa, Artificial Sequence
  source: /note="Description of Artificial Sequence: Synthetic peptide"
  MOD_RES (5)..(5): Citrulline
  MOD_RES (9)..(9): Citrulline
SVFQXGLKXLSGAMCT

SEQ ID NO: 6809 - protein, 16 aa, Artificial Sequence
  source: /note="Description of Artificial Sequence: Synthetic peptide"
  MOD_RES (10)..(10): Citrulline
  MOD_RES (12)..(12): Citrulline
AATSSSSATXGXGSSV

SEQ ID NO: 6810 - protein, 16 aa, Artificial Sequence
  source: /note="Description of Artificial Sequence: Synthetic peptide"
  MOD_RES (6)..(6): Citrulline
  MOD_RES (8)..(8): Citrulline
SSSATXGXGSSVGGGS

SEQ ID NO: 6811 - protein, 16 aa, Artificial Sequence
  source: /note="Description of Artificial Sequence: Synthetic peptide"
  MOD_RES (10)..(10): Citrulline
EWNFSASSVXGVSISK

SEQ ID NO: 6812 - protein, 16 aa, Artificial Sequence
  source: /note="Description of Artificial Sequence: Synthetic peptide"
  MOD_RES (6)..(6): Citrulline
  MOD_RES (16)..(16): Citrulline
SASSVXGVSISKFEEX

SEQ ID NO: 6813 - protein, 16 aa, Artificial Sequence
  source: /note="Description of Artificial Sequence: Synthetic peptide"
  MOD_RES (2)..(2): Citrulline
  MOD_RES (10)..(10): Citrulline
EXKKVIQHIXGMYKVD

SEQ ID NO: 6814 - protein, 16 aa, Artificial Sequence
  source: /note="Description of Artificial Sequence: Synthetic peptide"
  MOD_RES (6)..(6): Citrulline
VIQHIXGMYKVDLSAS

SEQ ID NO: 6815 - protein, 16 aa, Artificial Sequence
  source: /note="Description of Artificial Sequence: Synthetic peptide"
  MOD_RES (8)..(8): Citrulline
KLNEEHFXGQEFKDHA

SEQ ID NO: 6816 - protein, 16 aa, Artificial Sequence
  source: /note="Description of Artificial Sequence: Synthetic peptide"
  MOD_RES (9)..(9): Citrulline
EAINTFPYXGGSTNTG

SEQ ID NO: 6817 - protein, 16 aa, Artificial Sequence
  source: /note="Description of Artificial Sequence: Synthetic peptide"
  MOD_RES (5)..(5): Citrulline
TFPYXGGSTNTGKAMT

SEQ ID NO: 6818 - protein, 16 aa, Artificial Sequence
  source: /note="Description of Artificial Sequence: Synthetic peptide"
  MOD_RES (2)..(2): Citrulline
  MOD_RES (12)..(12): Citrulline
YXLKLSPADGTXGQEI

SEQ ID NO: 6819 - protein, 16 aa, Artificial Sequence
  source: /note="Description of Artificial Sequence: Synthetic peptide"
  MOD_RES (8)..(8): Citrulline
  MOD_RES (15)..(15): Citrulline
LSPADGTXGQEITVXG

SEQ ID NO: 6820 - protein, 16 aa, Artificial Sequence
  source: /note="Description of Artificial Sequence: Synthetic peptide"
  MOD_RES (4)..(4): Citrulline
  MOD_RES (11)..(11): Citrulline
DGTXGQEITVXGSETS

SEQ ID NO: 6821 - protein, 16 aa, Artificial Sequence
  source: /note="Description of Artificial Sequence: Synthetic peptide"
  MOD_RES (8)..(8): Citrulline
  MOD_RES (11)..(11): Citrulline
GPGAKGPXGEXGISGA

SEQ ID NO: 6822 - protein, 16 aa, Artificial Sequence
  source: /note="Description of Artificial Sequence: Synthetic peptide"
  MOD_RES (4)..(4): Citrulline
  MOD_RES (7)..(7): Citrulline
KGPXGEXGISGAIGPP

SEQ ID NO: 6823 - protein, 16 aa, Artificial Sequence
  source: /note="Description of Artificial Sequence: Synthetic peptide"
  MOD_RES (10)..(10): Citrulline
  MOD_RES (12)..(12): Citrulline
VPAVVFTTLXGXQLCA

SEQ ID NO: 6824 - protein, 16 aa, Artificial Sequence
  source: /note="Description of Artificial Sequence: Synthetic peptide"
  MOD_RES (6)..(6): Citrulline
  MOD_RES (8)..(8): Citrulline
VFTTLXGXQLCAPPDQ

SEQ ID NO: 6825 - protein, 16 aa, Artificial Sequence
  source: /note="Description of Artificial Sequence: Synthetic peptide"
  MOD_RES (10)..(10): Citrulline
DLEFYCHLLXGSLNPK

SEQ ID NO: 6826 - protein, 16 aa, Artificial Sequence
  source: /note="Description of Artificial Sequence: Synthetic peptide"
  MOD_RES (6)..(6): Citrulline
YCHLLXGSLNPKEFPT

SEQ ID NO: 6827 - protein, 16 aa, Artificial Sequence
  source: /note="Description of Artificial Sequence: Synthetic peptide"
  MOD_RES (2)..(2): Citrulline
LXGSLNPKEFPTYEYI

SEQ ID NO: 6828 - protein, 16 aa, Artificial Sequence
  source: /note="Description of Artificial Sequence: Synthetic peptide"
  MOD_RES (11)..(12): Citrulline
TKSPSAPINWXXGKLL

SEQ ID NO: 6829 - protein, 16 aa, Artificial Sequence
  source: /note="Description of Artificial Sequence: Synthetic peptide"
  MOD_RES (7)..(8): Citrulline
SAPINWXXGKLLGQGA

SEQ ID NO: 6830 - protein, 16 aa, Artificial Sequence
  source: /note="Description of Artificial Sequence: Synthetic peptide"
  MOD_RES (9)..(9): Citrulline
  MOD_RES (12)..(12): Citrulline
HQDCHFTIXGGXLKED

SEQ ID NO: 6831 - protein, 16 aa, Artificial Sequence
  source: /note="Description of Artificial Sequence: Synthetic peptide"
  MOD_RES (5)..(5): Citrulline
  MOD_RES (8)..(8): Citrulline
HFTIXGGXLKEDGDYQ

SEQ ID NO: 6832 - protein, 16 aa, Artificial Sequence
  source: /note="Description of Artificial Sequence: Synthetic peptide"
  MOD_RES (1)..(1): Citrulline
  MOD_RES (4)..(4): Citrulline
XGGXLKEDGDYQLPVV

SEQ ID NO: 6833 - protein, 16 aa, Artificial Sequence
  source: /note="Description of Artificial Sequence: Synthetic peptide"
  MOD_RES (6)..(6): Citrulline
  MOD_RES (14)..(14): Citrulline
STFKTXSAKGFGAXGP

SEQ ID NO: 6834 - protein, 16 aa, Artificial Sequence
  source: /note="Description of Artificial Sequence: Synthetic peptide"
  MOD_RES (2)..(2): Citrulline
  MOD_RES (10)..(10): Citrulline
TXSAKGFGAXGPDVLS

SEQ ID NO: 6835 - protein, 16 aa, Artificial Sequence
  source: /note="Description of Artificial Sequence: Synthetic peptide"
  MOD_RES (12)..(12): Citrulline
YEFVTPVEEAPXGALV

SEQ ID NO: 6836 - protein, 16 aa, Artificial Sequence
  source: /note="Description of Artificial Sequence: Synthetic peptide"
  MOD_RES (8)..(8): Citrulline
  MOD_RES (13)..(13): Citrulline
TPVEEAPXGALVXGPY

SEQ ID NO: 6837 - protein, 16 aa, Artificial Sequence
  source: /note="Description of Artificial Sequence: Synthetic peptide"
  MOD_RES (1)..(1): Citrulline
  MOD_RES (7)..(7): Citrulline
XTTLGPXGMDKLIVDG

SEQ ID NO: 6838 - protein, 16 aa, Artificial Sequence
  source: /note="Description of Artificial Sequence: Synthetic peptide"
  MOD_RES (3)..(3): Citrulline
  MOD_RES (13)..(13): Citrulline
GPXGMDKLIVDGXGKA

SEQ ID NO: 6839 - protein, 16 aa, Artificial Sequence
  source: /note="Description of Artificial Sequence: Synthetic peptide"
  MOD_RES (9)..(9): Citrulline
MDKLIVDGXGKATISN

SEQ ID NO: 6840 - protein, 16 aa, Artificial Sequence
  source: /note="Description of Artificial Sequence: Synthetic peptide"
  MOD_RES (11)..(11): Citrulline
PKAKTCTFILXGGAEQ

SEQ ID NO: 6841 - protein, 16 aa, Artificial Sequence
  source: /note="Description of Artificial Sequence: Synthetic peptide"
  MOD_RES (7)..(7): Citrulline
TCTFILXGGAEQFMEE

SEQ ID NO: 6842 - protein, 16 aa, Artificial Sequence
  source: /note="Description of Artificial Sequence: Synthetic peptide"
  MOD_RES (12)..(13): Citrulline
AWAQHVTKMVAXXGAI

SEQ ID NO: 6843 - protein, 16 aa, Artificial Sequence
  source: /note="Description of Artificial Sequence: Synthetic peptide"
  MOD_RES (8)..(9): Citrulline
HVTKMVAXXGAILPQD

SEQ ID NO: 6844 - protein, 16 aa, Artificial Sequence
  source: /note="Description of Artificial Sequence: Synthetic peptide"
  MOD_RES (4)..(5): Citrulline
MVAXXGAILPQDISVT

SEQ ID NO: 6845 - protein, 16 aa, Artificial Sequence
  source: /note="Description of Artificial Sequence: Synthetic peptide"
  MOD_RES (1)..(1): Citrulline
  MOD_RES (9)..(9): Citrulline
XELQDAFSXGLLKPGL

SEQ ID NO: 6846 - protein, 16 aa, Artificial Sequence
  source: /note="Description of Artificial Sequence: Synthetic peptide"
  MOD_RES (5)..(5): Citrulline
DAFSXGLLKPGLNVVL

SEQ ID NO: 6847 - protein, 16 aa, Artificial Sequence
  source: /note="Description of Artificial Sequence: Synthetic peptide"
  MOD_RES (11)..(11): Citrulline
LDDLFSFMQKXGTPVN

SEQ ID NO: 6848 - protein, 16 aa, Artificial Sequence
  source: /note="Description of Artificial Sequence: Synthetic peptide"
  MOD_RES (7)..(7): Citrulline
  MOD_RES (13)..(13): Citrulline
FSFMQKXGTPVNXIPI

SEQ ID NO: 6849 - protein, 16 aa, Artificial Sequence
  source: /note="Description of Artificial Sequence: Synthetic peptide"
  MOD_RES (8)..(8): Citrulline
HGSKDEWXGMVLAQAP

SEQ ID NO: 6850 - protein, 16 aa, Artificial Sequence
  source: /note="Description of Artificial Sequence: Synthetic peptide"
  MOD_RES (4)..(4): Citrulline
DEWXGMVLAQAPIMKA

SEQ ID NO: 6851 - protein, 16 aa, Artificial Sequence
  source: /note="Description of Artificial Sequence: Synthetic peptide"
  MOD_RES (5)..(5): Citrulline
  MOD_RES (14)..(14): Citrulline
AGISXEKVVPLYGXGS

SEQ ID NO: 6852 - protein, 16 aa, Artificial Sequence
  source: /note="Description of Artificial Sequence: Synthetic peptide"
  MOD_RES (1)..(1): Citrulline
  MOD_RES (10)..(10): Citrulline
XEKVVPLYGXGSQKPQ

SEQ ID NO: 6853 - protein, 16 aa, Artificial Sequence
  source: /note="Description of Artificial Sequence: Synthetic peptide"
  MOD_RES (6)..(6): Citrulline
  MOD_RES (15)..(15): Citrulline
VPLYGXGSQKPQDPXL

SEQ ID NO: 6854 - protein, 16 aa, Artificial Sequence
  source: /note="Description of Artificial Sequence: Synthetic peptide"
  MOD_RES (2)..(2): Citrulline
  MOD_RES (11)..(11): Citrulline
GXGSQKPQDPXLKTPP

SEQ ID NO: 6855 - protein, 16 aa, Artificial Sequence
  source: /note="Description of Artificial Sequence: Synthetic peptide"
  MOD_RES (6)..(6): Citrulline
  MOD_RES (9)..(9): Citrulline
AELWGXGDXIESLSDQ

SEQ ID NO: 6856 - protein, 16 aa, Artificial Sequence
  source: /note="Description of Artificial Sequence: Synthetic peptide"
  MOD_RES (10)..(10): Citrulline
  MOD_RES (13)..(13): Citrulline
AGTTATYEGXWGXGTA

SEQ ID NO: 6857 - protein, 16 aa, Artificial Sequence
  source: /note="Description of Artificial Sequence: Synthetic peptide"
  MOD_RES (6)..(6): Citrulline
  MOD_RES (9)..(9): Citrulline
ATYEGXWGXGTAQYSS

SEQ ID NO: 6858 - protein, 16 aa, Artificial Sequence
  source: /note="Description of Artificial Sequence: Synthetic peptide"
  MOD_RES (2)..(2): Citrulline
  MOD_RES (5)..(5): Citrulline
GXWGXGTAQYSSQKSV

SEQ ID NO: 6859 - protein, 16 aa, Artificial Sequence
  source: /note="Description of Artificial Sequence: Synthetic peptide"
  MOD_RES (11)..(11): Citrulline
GLIDSLVHYVXGTIAD

SEQ ID NO: 6860 - protein, 16 aa, Artificial Sequence
  source: /note="Description of Artificial Sequence: Synthetic peptide"
  MOD_RES (7)..(7): Citrulline
SLVHYVXGTIADYQPD

SEQ ID NO: 6861 - protein, 16 aa, Artificial Sequence
  source: /note="Description of Artificial Sequence: Synthetic peptide"
  MOD_RES (3)..(3): Citrulline
YVXGTIADYQPDDKAT

SEQ ID NO: 6862 - protein, 16 aa, Artificial Sequence
  source: /note="Description of Artificial Sequence: Synthetic peptide"
  MOD_RES (10)..(10): Citrulline
SMINTMSKIXGQEKGP

SEQ ID NO: 6863 - protein, 16 aa, Artificial Sequence
  source: /note="Description of Artificial Sequence: Synthetic peptide"
  MOD_RES (6)..(6): Citrulline
TMSKIXGQEKGPGYPQ

SEQ ID NO: 6864 - protein, 16 aa, Artificial Sequence
  source: /note="Description of Artificial Sequence: Synthetic peptide"
  MOD_RES (2)..(2): Citrulline
IXGQEKGPGYPQAEAL

SEQ ID NO: 6865 - protein, 16 aa, Artificial Sequence
  source: /note="Description of Artificial Sequence: Synthetic peptide"
  MOD_RES (10)..(10): Citrulline
GCLKLWDTVXGQLAFQ

SEQ ID NO: 6866 - protein, 16 aa, Artificial Sequence
  source: /note="Description of Artificial Sequence: Synthetic peptide"
  MOD_RES (11)..(11): Citrulline
SVHYKKLYVSXGSAST

SEQ ID NO: 6867 - protein, 16 aa, Artificial Sequence
  source: /note="Description of Artificial Sequence: Synthetic peptide"
  MOD_RES (7)..(7): Citrulline
KKLYVSXGSASTSLPN

SEQ ID NO: 6868 - protein, 16 aa, Artificial Sequence
  source: /note="Description of Artificial Sequence: Synthetic peptide"
  MOD_RES (3)..(3): Citrulline
VSXGSASTSLPNETLS

SEQ ID NO: 6869 - protein, 16 aa, Artificial Sequence
  source: /note="Description of Artificial Sequence: Synthetic peptide"
  MOD_RES (2)..(2): Citrulline
  MOD_RES (9)..(9): Citrulline
DXMSVIWEXGVVGGKM

SEQ ID NO: 6870 - protein, 16 aa, Artificial Sequence
  source: /note="Description of Artificial Sequence: Synthetic peptide"
  MOD_RES (5)..(5): Citrulline
  MOD_RES (16)..(16): Citrulline
VIWEXGVVGGKMDENX

SEQ ID NO: 6871 - protein, 16 aa, Artificial Sequence
  source: /note="Description of Artificial Sequence: Synthetic peptide"
  MOD_RES (4)..(4): Citrulline
  MOD_RES (12)..(12): Citrulline
YFKXLTCEISTXGTSA

SEQ ID NO: 6872 - protein, 16 aa, Artificial Sequence
  source: /note="Description of Artificial Sequence: Synthetic peptide"
  MOD_RES (8)..(8): Citrulline
  MOD_RES (16)..(16): Citrulline
LTCEISTXGTSAGMVX

SEQ ID NO: 6873 - protein, 16 aa, Artificial Sequence
  source: /note="Description of Artificial Sequence: Synthetic peptide"
  MOD_RES (8)..(8): Citrulline
CLTLYTGXGGDLQKIG

SEQ ID NO: 6874 - protein, 16 aa, Artificial Sequence
  source: /note="Description of Artificial Sequence: Synthetic peptide"
  MOD_RES (4)..(4): Citrulline
YTGXGGDLQKIGEFCM

SEQ ID NO: 6875 - protein, 16 aa, Artificial Sequence
  source: /note="Description of Artificial Sequence: Synthetic peptide"
  MOD_RES (13)..(13): Citrulline
PDAWGLPTPQQAXGKA

SEQ ID NO: 6876 - protein, 16 aa, Artificial Sequence
  source: /note="Description of Artificial Sequence: Synthetic peptide"
  MOD_RES (9)..(9): Citrulline
  MOD_RES (13)..(13): Citrulline
GLPTPQQAXGKAXGNE

SEQ ID NO: 6877 - protein, 16 aa, Artificial Sequence
  source: /note="Description of Artificial Sequence: Synthetic peptide"
  MOD_RES (5)..(5): Citrulline
  MOD_RES (9)..(9): Citrulline
PQQAXGKAXGNEYQPS

SEQ ID NO: 6878 - protein, 16 aa, Artificial Sequence
  source: /note="Description of Artificial Sequence: Synthetic peptide"
  MOD_RES (8)..(8): Citrulline
  MOD_RES (11)..(11): Citrulline
VAPGNKGXGQXGNTES

SEQ ID NO: 6879 - protein, 16 aa, Artificial Sequence
  source: /note="Description of Artificial Sequence: Synthetic peptide"
  MOD_RES (4)..(4): Citrulline
  MOD_RES (7)..(7): Citrulline
NKGXGQXGNTESKTDG

SEQ ID NO: 6880 - protein, 16 aa, Artificial Sequence
  source: /note="Description of Artificial Sequence: Synthetic peptide"
  MOD_RES (8)..(8): Citrulline
FEVCWNAXGDKVGASA

SEQ ID NO: 6881 - protein, 16 aa, Artificial Sequence
  source: /note="Description of Artificial Sequence: Synthetic peptide"
  MOD_RES (4)..(4): Citrulline
WNAXGDKVGASASDGS

SEQ ID NO: 6882 - protein, 16 aa, Artificial Sequence
  source: /note="Description of Artificial Sequence: Synthetic peptide"
  MOD_RES (10)..(10): Citrulline
VEGPAQAMSXGTMIVG

SEQ ID NO: 6883 - protein, 16 aa, Artificial Sequence
  source: /note="Description of Artificial Sequence: Synthetic peptide"
  MOD_RES (6)..(6): Citrulline
AQAMSXGTMIVGAATG

SEQ ID NO: 6884 - protein, 16 aa, Artificial Sequence
  source: /note="Description of Artificial Sequence: Synthetic peptide"
  MOD_RES (10)..(10): Citrulline
  MOD_RES (14)..(14): Citrulline
PHKSCYLSEXGSQXSK

SEQ ID NO: 6885 - protein, 16 aa, Artificial Sequence
  source: /note="Description of Artificial Sequence: Synthetic peptide"
  MOD_RES (6)..(6): Citrulline
  MOD_RES (10)..(10): Citrulline
CYLSEXGSQXSKTVDD

SEQ ID NO: 6886 - protein, 16 aa, Artificial Sequence
  source: /note="Description of Artificial Sequence: Synthetic peptide"
  MOD_RES (10)..(10): Citrulline
  MOD_RES (12)..(12): Citrulline
ATEKLLEYLXGXPKGS

SEQ ID NO: 6887 - protein, 16 aa, Artificial Sequence
  source: /note="Description of Artificial Sequence: Synthetic peptide"
  MOD_RES (6)..(6): Citrulline
  MOD_RES (8)..(8): Citrulline
LLEYLXGXPKGSEMKY

SEQ ID NO: 6888 - protein, 16 aa, Artificial Sequence
  source: /note="Description of Artificial Sequence: Synthetic peptide"
  MOD_RES (3)..(3): Citrulline
  MOD_RES (10)..(10): Citrulline
ESXIFTVNPXGELIQE

SEQ ID NO: 6889 - protein, 16 aa, Artificial Sequence
  source: /note="Description of Artificial Sequence: Synthetic peptide"
  MOD_RES (6)..(6): Citrulline
FTVNPXGELIQELIKN

SEQ ID NO: 6890 - protein, 16 aa, Artificial Sequence
  source: /note="Description of Artificial Sequence: Synthetic peptide"
  MOD_RES (11)..(11): Citrulline
SNLVQSVLSSXGVAQT

SEQ ID NO: 6891 - protein, 16 aa, Artificial Sequence
  source: /note="Description of Artificial Sequence: Synthetic peptide"
  MOD_RES (7)..(7): Citrulline
QSVLSSXGVAQTPGSV

SEQ ID NO: 6892 - protein, 16 aa, Artificial Sequence
  source: /note="Description of Artificial Sequence: Synthetic peptide"
  MOD_RES (9)..(9): Citrulline
NMKCCPFSXGKKCLDF

SEQ ID NO: 6893 - protein, 16 aa, Artificial Sequence
  source: /note="Description of Artificial Sequence: Synthetic peptide"
  MOD_RES (5)..(5): Citrulline
  MOD_RES (13)..(13): Citrulline
CPFSXGKKCLDFXKIY

SEQ ID NO: 6894 - protein, 16 aa, Artificial Sequence
  source: /note="Description of Artificial Sequence: Synthetic peptide"
  MOD_RES (11)..(11): Citrulline
ALGPTGQAGSXGLTFE

SEQ ID NO: 6895 - protein, 16 aa, Artificial Sequence
  source: /note="Description of Artificial Sequence: Synthetic peptide"
  MOD_RES (7)..(7): Citrulline
TGQAGSXGLTFEAQDN

SEQ ID NO: 6896 - protein, 16 aa, Artificial Sequence
  source: /note="Description of Artificial Sequence: Synthetic peptide"
  MOD_RES (3)..(3): Citrulline
GSXGLTFEAQDNGSAF

SEQ ID NO: 6897 - protein, 16 aa, Artificial Sequence
  source: /note="Description of Artificial Sequence: Synthetic peptide"
  MOD_RES (11)..(11): Citrulline
LADKPTALQPXGAHLP

SEQ ID NO: 6898 - protein, 16 aa, Artificial Sequence
  source: /note="Description of Artificial Sequence: Synthetic peptide"
  MOD_RES (7)..(7): Citrulline
PTALQPXGAHLPPPQL

SEQ ID NO: 6899 - protein, 16 aa, Artificial Sequence
  source: /note="Description of Artificial Sequence: Synthetic peptide"
  MOD_RES (3)..(3): Citrulline
QPXGAHLPPPQLWLPP

SEQ ID NO: 6900 - protein, 16 aa, Artificial Sequence
  source: /note="Description of Artificial Sequence: Synthetic peptide"
  MOD_RES (7)..(7): Citrulline
  MOD_RES (10)..(10): Citrulline
MTVWHAXQAXGSAKPS

SEQ ID NO: 6901 - protein, 16 aa, Artificial Sequence
  source: /note="Description of Artificial Sequence: Synthetic peptide"
  MOD_RES (3)..(3): Citrulline
  MOD_RES (6)..(6): Citrulline
HAXQAXGSAKPSFSIS

SEQ ID NO: 6902 - protein, 16 aa, Artificial Sequence
  source: /note="Description of Artificial Sequence: Synthetic peptide"
  MOD_RES (10)..(10): Citrulline
  MOD_RES (13)..(13): Citrulline
HDTPDPSPLXGAXHDS

SEQ ID NO: 6903 - protein, 16 aa, Artificial Sequence
  source: /note="Description of Artificial Sequence: Synthetic peptide"
  MOD_RES (6)..(6): Citrulline
  MOD_RES (9)..(9): Citrulline
DPSPLXGAXHDSDTSP

SEQ ID NO: 6904 - protein, 16 aa, Artificial Sequence
  source: /note="Description of Artificial Sequence: Synthetic peptide"
  MOD_RES (10)..(10): Citrulline
GHLPSHGSGXGALPGP

SEQ ID NO: 6905 - protein, 16 aa, Artificial Sequence
  source: /note="Description of Artificial Sequence: Synthetic peptide"
  MOD_RES (6)..(6): Citrulline
  MOD_RES (14)..(14): Citrulline
SHGSGXGALPGPAXGV

SEQ ID NO: 6906 - protein, 16 aa, Artificial Sequence
  source: /note="Description of Artificial Sequence: Synthetic peptide"
  MOD_RES (2)..(2): Citrulline
  MOD_RES (10)..(10): Citrulline
GXGALPGPAXGVPTGP

SEQ ID NO: 6907 - protein, 16 aa, Artificial Sequence
  source: /note="Description of Artificial Sequence: Synthetic peptide"
  MOD_RES (9)..(9): Citrulline
  MOD_RES (16)..(16): Citrulline
EQDSVVTAXGLLDAKX

SEQ ID NO: 6908 - protein, 16 aa, Artificial Sequence
  source: /note="Description of Artificial Sequence: Synthetic peptide"
  MOD_RES (5)..(5): Citrulline
  MOD_RES (12)..(12): Citrulline
VVTAXGLLDAKXVGVA

SEQ ID NO: 6909 - protein, 16 aa, Artificial Sequence
  source: /note="Description of Artificial Sequence: Synthetic peptide"
  MOD_RES (7)..(7): Citrulline
  MOD_RES (11)..(11): Citrulline
ILGLGPXSPPXGSQLC

SEQ ID NO: 6910 - protein, 16 aa, Artificial Sequence
  source: /note="Description of Artificial Sequence: Synthetic peptide"
  MOD_RES (3)..(3): Citrulline
  MOD_RES (7)..(7): Citrulline
GPXSPPXGSQLCALYA

SEQ ID NO: 6911 - protein, 16 aa, Artificial Sequence
  source: /note="Description of Artificial Sequence: Synthetic peptide"
  MOD_RES (8)..(8): Citrulline
LSEIFAAXGDYLQTLK

SEQ ID NO: 6912 - protein, 16 aa, Artificial Sequence
  source: /note="Description of Artificial Sequence: Synthetic peptide"
  MOD_RES (4)..(4): Citrulline
FAAXGDYLQTLKFIQQ

SEQ ID NO: 6913 - protein, 16 aa, Artificial Sequence
  source: /note="Description of Artificial Sequence: Synthetic peptide"
  MOD_RES (11)..(11): Citrulline
  MOD_RES (16)..(16): Citrulline
GFDVVTLSGTXGPLSX

SEQ ID NO: 6914 - protein, 16 aa, Artificial Sequence
  source: /note="Description of Artificial Sequence: Synthetic peptide"
  MOD_RES (7)..(7): Citrulline
  MOD_RES (12)..(12): Citrulline
VTLSGTXGPLSXVGLE

SEQ ID NO: 6915 - protein, 16 aa, Artificial Sequence
  source: /note="Description of Artificial Sequence: Synthetic peptide"
  MOD_RES (3)..(3): Citrulline
  MOD_RES (8)..(8): Citrulline
GTXGPLSXVGLEPPPG

SEQ ID NO: 6916 - protein, 16 aa, Artificial Sequence
  source: /note="Description of Artificial Sequence: Synthetic peptide"
  MOD_RES (2)..(2): Citrulline
  MOD_RES (9)..(9): Citrulline
KXVVQIGIXGSSTTLD

SEQ ID NO: 6917 - protein, 16 aa, Artificial Sequence
  source: /note="Description of Artificial Sequence: Synthetic peptide"
  MOD_RES (5)..(5): Citrulline
  MOD_RES (15)..(15): Citrulline
QIGIXGSSTTLDPYXY

SEQ ID NO: 6918 - protein, 16 aa, Artificial Sequence
  source: /note="Description of Artificial Sequence: Synthetic peptide"
  MOD_RES (9)..(9): Citrulline
INLVSIGYXGTKPDSL

SEQ ID NO: 6919 - protein, 16 aa, Artificial Sequence
  source: /note="Description of Artificial Sequence: Synthetic peptide"
  MOD_RES (5)..(5): Citrulline
SIGYXGTKPDSLFKLE

SEQ ID NO: 6920 - protein, 16 aa, Artificial Sequence
  source: /note="Description of Artificial Sequence: Synthetic peptide"
  MOD_RES (13)..(13): Citrulline
GWGSEAAGFQESXGTV

SEQ ID NO: 6921 - protein, 16 aa, Artificial Sequence
  source: /note="Description of Artificial Sequence: Synthetic peptide"
  MOD_RES (9)..(9): Citrulline
EAAGFQESXGTVKLQF

SEQ ID NO: 6922 - protein, 16 aa, Artificial Sequence
  source: /note="Description of Artificial Sequence: Synthetic peptide"
  MOD_RES (5)..(5): Citrulline
  MOD_RES (16)..(16): Citrulline
FQESXGTVKLQFDMMX

SEQ ID NO: 6923 - protein, 16 aa, Artificial Sequence
  source: /note="Description of Artificial Sequence: Synthetic peptide"
  MOD_RES (2)..(2): Citrulline
  MOD_RES (11)..(11): Citrulline
LXTLPGPSWVXGSGPS

SEQ ID NO: 6924 - protein, 16 aa, Artificial Sequence
  source: /note="Description of Artificial Sequence: Synthetic peptide"
  MOD_RES (7)..(7): Citrulline
  MOD_RES (16)..(16): Citrulline
PGPSWVXGSGPSVLSX

SEQ ID NO: 6925 - protein, 16 aa, Artificial Sequence
  source: /note="Description of Artificial Sequence: Synthetic peptide"
  MOD_RES (7)..(7): Citrulline
  MOD_RES (10)..(10): Citrulline
EKMYLDXIIXGNQLQE

SEQ ID NO: 6926 - protein, 16 aa, Artificial Sequence
  source: /note="Description of Artificial Sequence: Synthetic peptide"
  MOD_RES (3)..(3): Citrulline
  MOD_RES (6)..(6): Citrulline
LDXIIXGNQLQEFAAM

SEQ ID NO: 6927 - protein, 16 aa, Artificial Sequence
  source: /note="Description of Artificial Sequence: Synthetic peptide"
  MOD_RES (2)..(2): Citrulline
IXGNQLQEFAAMLMPH

SEQ ID NO: 6928 - protein, 16 aa, Artificial Sequence
  source: /note="Description of Artificial Sequence: Synthetic peptide"
  MOD_RES (5)..(5): Citrulline
  MOD_RES (9)..(9): Citrulline
LPEKXSGSXGALGEKE

SEQ ID NO: 6929 - protein, 16 aa, Artificial Sequence
  source: /note="Description of Artificial Sequence: Synthetic peptide"
  MOD_RES (4)..(4): Citrulline
  MOD_RES (12)..(12): Citrulline
IIKXNIQKCISXGELQ

SEQ ID NO: 6930 - protein, 16 aa, Artificial Sequence
  source: /note="Description of Artificial Sequence: Synthetic peptide"
  MOD_RES (8)..(8): Citrulline
NIQKCISXGELQVSLS

SEQ ID NO: 6931 - protein, 16 aa, Artificial Sequence
  source: /note="Description of Artificial Sequence: Synthetic peptide"
  MOD_RES (4)..(4): Citrulline
  MOD_RES (8)..(8): Citrulline
PLSXLSAXGAQGALPE

SEQ ID NO: 6932 - protein, 16 aa, Artificial Sequence
  source: /note="Description of Artificial Sequence: Synthetic peptide"
  MOD_RES (4)..(4): Citrulline
  MOD_RES (13)..(13): Citrulline
LSAXGAQGALPEXDAS

SEQ ID NO: 6933 - protein, 16 aa, Artificial Sequence
  source: /note="Description of Artificial Sequence: Synthetic peptide"
  MOD_RES (11)..(11): Citrulline
GPSPSYLGGPXGVAPS

SEQ ID NO: 6934 - protein, 16 aa, Artificial Sequence
  source: /note="Description of Artificial Sequence: Synthetic peptide"
  MOD_RES (8)..(8): Citrulline
LSQLKGPXGGPPPSQF

SEQ ID NO: 6935 - protein, 16 aa, Artificial Sequence
  source: /note="Description of Artificial Sequence: Synthetic peptide"
  MOD_RES (4)..(4): Citrulline
  MOD_RES (16)..(16): Citrulline
KGPXGGPPPSQFGGQX

SEQ ID NO: 6936 - protein, 16 aa, Artificial Sequence
  source: /note="Description of Artificial Sequence: Synthetic peptide"
  MOD_RES (5)..(5): Citrulline
  MOD_RES (16)..(16): Citrulline
FEGPXGQAPNFMPGPX

SEQ ID NO: 6937 - protein, 16 aa, Artificial Sequence
  source: /note="Description of Artificial Sequence: Synthetic peptide"
  MOD_RES (1)..(1): Citrulline
  MOD_RES (12)..(12): Citrulline
XGQAPNFMPGPXGIQP

SEQ ID NO: 6938 - protein, 16 aa, Artificial Sequence
  source: /note="Description of Artificial Sequence: Synthetic peptide"
  MOD_RES (9)..(9): Citrulline
APLQFGGLXGSAPFSE

SEQ ID NO: 6939 - protein, 16 aa, Artificial Sequence
  source: /note="Description of Artificial Sequence: Synthetic peptide"
  MOD_RES (5)..(5): Citrulline
FGGLXGSAPFSEKNEQ

SEQ ID NO: 6940 - protein, 16 aa, Artificial Sequence
  source: /note="Description of Artificial Sequence: Synthetic peptide"
  MOD_RES (1)..(1): Citrulline
  MOD_RES (12)..(12): Citrulline
XGQFHKQIAVMXGQIL

SEQ ID NO: 6941 - protein, 16 aa, Artificial Sequence
  source: /note="Description of Artificial Sequence: Synthetic peptide"
  MOD_RES (8)..(8): Citrulline
HKQIAVMXGQILNLTQ

SEQ ID NO: 6942 - protein, 16 aa, Artificial Sequence
  source: /note="Description of Artificial Sequence: Synthetic peptide"
  MOD_RES (4)..(4): Citrulline
AVMXGQILNLTQALKD

SEQ ID NO: 6943 - protein, 16 aa, Artificial Sequence
  source: /note="Description of Artificial Sequence: Synthetic peptide"
  MOD_RES (6)..(6): Citrulline
  MOD_RES (8)..(8): Citrulline
VTVIAXQXGDQLVPFS

SEQ ID NO: 6944 - protein, 16 aa, Artificial Sequence
  source: /note="Description of Artificial Sequence: Synthetic peptide"
  MOD_RES (2)..(2): Citrulline
  MOD_RES (4)..(4): Citrulline
AXQXGDQLVPFSTKSG

SEQ ID NO: 6945 - protein, 16 aa, Artificial Sequence
  source: /note="Description of Artificial Sequence: Synthetic peptide"
  MOD_RES (7)..(7): Citrulline
  MOD_RES (12)..(12): Citrulline
QVPSAVXCLQKXGSAT

SEQ ID NO: 6946 - protein, 16 aa, Artificial Sequence
  source: /note="Description of Artificial Sequence: Synthetic peptide"
  MOD_RES (3)..(3): Citrulline
  MOD_RES (8)..(8): Citrulline
AVXCLQKXGSATSSSN

SEQ ID NO: 6947 - protein, 16 aa, Artificial Sequence
  source: /note="Description of Artificial Sequence: Synthetic peptide"
  MOD_RES (4)..(4): Citrulline
LQKXGSATSSSNTSLT

SEQ ID NO: 6948 - protein, 16 aa, Artificial Sequence
  source: /note="Description of Artificial Sequence: Synthetic peptide"
  MOD_RES (10)..(10): Citrulline
AMYIDSYNSXGFMING

SEQ ID NO: 6949 - protein, 16 aa, Artificial Sequence
  source: /note="Description of Artificial Sequence: Synthetic peptide"
  MOD_RES (6)..(6): Citrulline
  MOD_RES (14)..(14): Citrulline
DSYNSXGFMINGNXVL

SEQ ID NO: 6950 - protein, 16 aa, Artificial Sequence
  source: /note="Description of Artificial Sequence: Synthetic peptide"
  MOD_RES (6)..(6): Citrulline
  MOD_RES (10)..(10): Citrulline
MFGSSXGGVXGGQDQF

SEQ ID NO: 6951 - protein, 16 aa, Artificial Sequence
  source: /note="Description of Artificial Sequence: Synthetic peptide"
  MOD_RES (2)..(2): Citrulline
  MOD_RES (6)..(6): Citrulline
SXGGVXGGQDQFNWED

SEQ ID NO: 6952 - protein, 16 aa, Artificial Sequence
  source: /note="Description of Artificial Sequence: Synthetic peptide"
  MOD_RES (8)..(8): Citrulline
  MOD_RES (10)..(10): Citrulline
QHLPLSEXIXGTVGPK

SEQ ID NO: 6953 - protein, 16 aa, Artificial Sequence
  source: /note="Description of Artificial Sequence: Synthetic peptide"
  MOD_RES (4)..(4): Citrulline
  MOD_RES (6)..(6): Citrulline
LSEXIXGTVGPKSKAE

SEQ ID NO: 6954 - protein, 16 aa, Artificial Sequence
  source: /note="Description of Artificial Sequence: Synthetic peptide"
  MOD_RES (2)..(2): Citrulline
IXGTVGPKSKAECEIL

SEQ ID NO: 6955 - protein, 16 aa, Artificial Sequence
  source: /note="Description of Artificial Sequence: Synthetic peptide"
  MOD_RES (4)..(4): Citrulline
  MOD_RES (11)..(11): Citrulline
YENXGPPGGNXGGFQN

SEQ ID NO: 6956 - protein, 16 aa, Artificial Sequence
  source: /note="Description of Artificial Sequence: Synthetic peptide"
  MOD_RES (7)..(7): Citrulline
  MOD_RES (13)..(13): Citrulline
GPPGGNXGGFQNXGGG

SEQ ID NO: 6957 - protein, 16 aa, Artificial Sequence
  source: /note="Description of Artificial Sequence: Synthetic peptide"
  MOD_RES (3)..(3): Citrulline
  MOD_RES (9)..(9): Citrulline
GNXGGFQNXGGGSGGG

SEQ ID NO: 6958 - protein, 16 aa, Artificial Sequence
  source: /note="Description of Artificial Sequence: Synthetic peptide"
  MOD_RES (5)..(5): Citrulline
  MOD_RES (16)..(16): Citrulline
GFQNXGGGSGGGGNYX

SEQ ID NO: 6959 - protein, 16 aa, Artificial Sequence
  source: /note="Description of Artificial Sequence: Synthetic peptide"
  MOD_RES (1)..(1): Citrulline
  MOD_RES (12)..(12): Citrulline
XGGGSGGGGNYXGGFN

SEQ ID NO: 6960 - protein, 16 aa, Artificial Sequence
  source: /note="Description of Artificial Sequence: Synthetic peptide"
  MOD_RES (8)..(8): Citrulline
  MOD_RES (13)..(13): Citrulline
SGGGGNYXGGFNXSGG

SEQ ID NO: 6961 - protein, 16 aa, Artificial Sequence
  source: /note="Description of Artificial Sequence: Synthetic peptide"
  MOD_RES (4)..(4): Citrulline
  MOD_RES (9)..(9): Citrulline
GNYXGGFNXSGGGGYS

SEQ ID NO: 6962 - protein, 16 aa, Artificial Sequence
  source: /note="Description of Artificial Sequence: Synthetic peptide"
  MOD_RES (12)..(12): Citrulline
HDVGFCCLGTTXGKAG

SEQ ID NO: 6963 - protein, 16 aa, Artificial Sequence
  source: /note="Description of Artificial Sequence: Synthetic peptide"
  MOD_RES (8)..(8): Citrulline
FCCLGTTXGKAGAEGF

SEQ ID NO: 6964 - protein, 16 aa, Artificial Sequence
  source: /note="Description of Artificial Sequence: Synthetic peptide"
  MOD_RES (5)..(5): Citrulline
LLLAXGSKIKKLVYPP

SEQ ID NO: 6965 - protein, 16 aa, Artificial Sequence
  source: /note="Description of Artificial Sequence: Synthetic peptide"
  MOD_RES (1)..(1): Citrulline
XGSKIKKLVYPPGFMG

SEQ ID NO: 6966 - protein, 16 aa, Artificial Sequence
  source: /note="Description of Artificial Sequence: Synthetic peptide"
  MOD_RES (1)..(1): Citrulline
  MOD_RES (10)..(10): Citrulline
XFWQGDTFHXGSDKMP

SEQ ID NO: 6967 - protein, 16 aa, Artificial Sequence
  source: /note="Description of Artificial Sequence: Synthetic peptide"
  MOD_RES (6)..(6): Citrulline
  MOD_RES (14)..(14): Citrulline
GDTFHXGSDKMPGXVV

SEQ ID NO: 6968 - protein, 16 aa, Artificial Sequence
  source: /note="Description of Artificial Sequence: Synthetic peptide"
  MOD_RES (8)..(8): Citrulline
FQKPGTWXGSLDESSL

SEQ ID NO: 6969 - protein, 16 aa, Artificial Sequence
  source: /note="Description of Artificial Sequence: Synthetic peptide"
  MOD_RES (8)..(8): Citrulline
  MOD_RES (12)..(12): Citrulline
ILSQEGMXGLYXGIAP

SEQ ID NO: 6970 - protein, 16 aa, Artificial Sequence
  source: /note="Description of Artificial Sequence: Synthetic peptide"
  MOD_RES (4)..(4): Citrulline
  MOD_RES (8)..(8): Citrulline
EGMXGLYXGIAPNFMK

SEQ ID NO: 6971 - protein, 16 aa, Artificial Sequence
  source: /note="Description of Artificial Sequence: Synthetic peptide"
  MOD_RES (7)..(7): Citrulline
  MOD_RES (14)..(14): Citrulline
ANLLTYXGGQAGPXGL

SEQ ID NO: 6972 - protein, 16 aa, Artificial Sequence
  source: /note="Description of Artificial Sequence: Synthetic peptide"
  MOD_RES (3)..(3): Citrulline
  MOD_RES (10)..(10): Citrulline
TYXGGQAGPXGLALLN

SEQ ID NO: 6973 - protein, 16 aa, Artificial Sequence
  source: /note="Description of Artificial Sequence: Synthetic peptide"
  MOD_RES (8)..(9): Citrulline
LTLCDLIXXGQLTAPA

SEQ ID NO: 6974 - protein, 16 aa, Artificial Sequence
  source: /note="Description of Artificial Sequence: Synthetic peptide"
  MOD_RES (4)..(5): Citrulline
DLIXXGQLTAPACSQV

SEQ ID NO: 6975 - protein, 16 aa, Artificial Sequence
  source: /note="Description of Artificial Sequence: Synthetic peptide"
  MOD_RES (7)..(7): Citrulline
  MOD_RES (10)..(10): Citrulline
VLTQIGXSVXGTLDAW

SEQ ID NO: 6976 - protein, 16 aa, Artificial Sequence
  source: /note="Description of Artificial Sequence: Synthetic peptide"
  MOD_RES (3)..(3): Citrulline
  MOD_RES (6)..(6): Citrulline
IGXSVXGTLDAWIGPE

SEQ ID NO: 6977 - protein, 16 aa, Artificial Sequence
  source: /note="Description of Artificial Sequence: Synthetic peptide"
  MOD_RES (8)..(8): Citrulline
QKLVVETXGSALDDAV

SEQ ID NO: 6978 - protein, 16 aa, Artificial Sequence
  source: /note="Description of Artificial Sequence: Synthetic peptide"
  MOD_RES (4)..(4): Citrulline
VETXGSALDDAVNPLH

SEQ ID NO: 6979 - protein, 16 aa, Artificial Sequence
  source: /note="Description of Artificial Sequence: Synthetic peptide"
  MOD_RES (5)..(5): Citrulline
  MOD_RES (11)..(11): Citrulline
HFGGXLAQSLXGTSKE

SEQ ID NO: 6980 - protein, 16 aa, Artificial Sequence
  source: /note="Description of Artificial Sequence: Synthetic peptide"
  MOD_RES (1)..(1): Citrulline
  MOD_RES (7)..(7): Citrulline
XLAQSLXGTSKEAASD

SEQ ID NO: 6981 - protein, 16 aa, Artificial Sequence
  source: /note="Description of Artificial Sequence: Synthetic peptide"
  MOD_RES (7)..(7): Citrulline
LGLAVPXGVLLAGPPG

SEQ ID NO: 6982 - protein, 16 aa, Artificial Sequence
  source: /note="Description of Artificial Sequence: Synthetic peptide"
  MOD_RES (8)..(9): Citrulline
VGLKTIEXXGSKSSQQ

SEQ ID NO: 6983 - protein, 16 aa, Artificial Sequence
  source: /note="Description of Artificial Sequence: Synthetic peptide"
  MOD_RES (4)..(5): Citrulline
TIEXXGSKSSQQEFQE

SEQ ID NO: 6984 - protein, 16 aa, Artificial Sequence
  source: /note="Description of Artificial Sequence: Synthetic peptide"
  MOD_RES (9)..(9): Citrulline
EDYVVLMKXGTAITFP

SEQ ID NO: 6985 - protein, 16 aa, Artificial Sequence
  source: /note="Description of Artificial Sequence: Synthetic peptide"
  MOD_RES (5)..(5): Citrulline
VLMKXGTAITFPKDIN

SEQ ID NO: 6986 - protein, 16 aa, Artificial Sequence
  source: /note="Description of Artificial Sequence: Synthetic peptide"
  MOD_RES (1)..(1): Citrulline
XGTAITFPKDINMILS

SEQ ID NO: 6987 - protein, 16 aa, Artificial Sequence
  source: /note="Description of Artificial Sequence: Synthetic peptide"
  MOD_RES (10)..(10): Citrulline
  MOD_RES (15)..(15): Citrulline
SLLASQALHXGELQXV

SEQ ID NO: 6988 - protein, 16 aa, Artificial Sequence
  source: /note="Description of Artificial Sequence: Synthetic peptide"
  MOD_RES (6)..(6): Citrulline
  MOD_RES (11)..(11): Citrulline
SQALHXGELQXVPTLL

SEQ ID NO: 6989 - protein, 16 aa, Artificial Sequence
  source: /note="Description of Artificial Sequence: Synthetic peptide"
  MOD_RES (13)..(13): Citrulline
  MOD_RES (15)..(15): Citrulline
EWGHAEELAKVVXGXI

SEQ ID NO: 6990 - protein, 16 aa, Artificial Sequence
  source: /note="Description of Artificial Sequence: Synthetic peptide"
  MOD_RES (9)..(9): Citrulline
  MOD_RES (11)..(11): Citrulline
AEELAKVVXGXILQEQ

SEQ ID NO: 6991 - protein, 16 aa, Artificial Sequence
  source: /note="Description of Artificial Sequence: Synthetic peptide"
  MOD_RES (10)..(10): Citrulline
VKQEWLEASXGNYLIM

SEQ ID NO: 6992 - protein, 16 aa, Artificial Sequence
  source: /note="Description of Artificial Sequence: Synthetic peptide"
  MOD_RES (6)..(6): Citrulline
WLEASXGNYLIMPSGN

SEQ ID NO: 6993 - protein, 16 aa, Artificial Sequence
  source: /note="Description of Artificial Sequence: Synthetic peptide"
  MOD_RES (12)..(12): Citrulline
NGYDPQSHQITXGPKS

SEQ ID NO: 6994 - protein, 16 aa, Artificial Sequence
  source: /note="Description of Artificial Sequence: Synthetic peptide"
  MOD_RES (8)..(8): Citrulline
PQSHQITXGPKSSPDE

SEQ ID NO: 6995 - protein, 16 aa, Artificial Sequence
  source: /note="Description of Artificial Sequence: Synthetic peptide"
  MOD_RES (4)..(4): Citrulline
QITXGPKSSPDEGSFL

SEQ ID NO: 6996 - protein, 16 aa, Artificial Sequence
  source: /note="Description of Artificial Sequence: Synthetic peptide"
  MOD_RES (6)..(6): Citrulline
YAAAVXGELGPAAAGS

SEQ ID NO: 6997 - protein, 16 aa, Artificial Sequence
  source: /note="Description of Artificial Sequence: Synthetic peptide"
  MOD_RES (7)..(7): Citrulline
  MOD_RES (12)..(12): Citrulline
SSKLPQXGQSNXGFHG

SEQ ID NO: 6998 - protein, 16 aa, Artificial Sequence
  source: /note="Description of Artificial Sequence: Synthetic peptide"
  MOD_RES (3)..(3): Citrulline
  MOD_RES (8)..(8): Citrulline
PQXGQSNXGFHGFLPE

SEQ ID NO: 6999 - protein, 16 aa, Artificial Sequence
  source: /note="Description of Artificial Sequence: Synthetic peptide"
  MOD_RES (12)..(12): Citrulline
GGPAVGGTLKAXGAGS

SEQ ID NO: 7000 - protein, 16 aa, Artificial Sequence
  source: /note="Description of Artificial Sequence: Synthetic peptide"
  MOD_RES (8)..(8): Citrulline
VGGTLKAXGAGSSSGC

SEQ ID NO: 7001 - protein, 16 aa, Artificial Sequence
  source: /note="Description of Artificial Sequence: Synthetic peptide"
  MOD_RES (4)..(5): Citrulline
CAYXXGYFINNKQDGE

SEQ ID NO: 7002 - protein, 16 aa, Artificial Sequence
  source: /note="Description of Artificial Sequence: Synthetic peptide"
  MOD_RES (1)..(1): Citrulline
XGYFINNKQDGESYKN

SEQ ID NO: 7003 - protein, 16 aa, Artificial Sequence
  source: /note="Description of Artificial Sequence: Synthetic peptide"
  MOD_RES (8)..(8): Citrulline
  MOD_RES (13)..(13): Citrulline
AVAATGVXGGQVXGAA

SEQ ID NO: 7004 - protein, 16 aa, Artificial Sequence
  source: /note="Description of Artificial Sequence: Synthetic peptide"
  MOD_RES (4)..(4): Citrulline
  MOD_RES (9)..(9): Citrulline
TGVXGGQVXGAAGVTD

SEQ ID NO: 7005 - protein, 16 aa, Artificial Sequence
  source: /note="Description of Artificial Sequence: Synthetic peptide"
  MOD_RES (13)..(13): Citrulline
  MOD_RES (15)..(15): Citrulline
LNLDKSMSSWSQXGXA

SEQ ID NO: 7006 - protein, 16 aa, Artificial Sequence
  source: /note="Description of Artificial Sequence: Synthetic peptide"
  MOD_RES (9)..(9): Citrulline
  MOD_RES (11)..(11): Citrulline
KSMSSWSQXGXAAMIQ

SEQ ID NO: 7007 - protein, 16 aa, Artificial Sequence
  source: /note="Description of Artificial Sequence: Synthetic peptide"
  MOD_RES (9)..(9): Citrulline
IKPEVKQSXGMVFGPA

SEQ ID NO: 7008 - protein, 16 aa, Artificial Sequence
  source: /note="Description of Artificial Sequence: Synthetic peptide"
  MOD_RES (5)..(5): Citrulline
VKQSXGMVFGPANLGE

SEQ ID NO: 7009 - protein, 16 aa, Artificial Sequence
  source: /note="Description of Artificial Sequence: Synthetic peptide"
  MOD_RES (13)..(13): Citrulline
AVQGDLLELIKTXGAL

SEQ ID NO: 7010 - protein, 16 aa, Artificial Sequence
  source: /note="Description of Artificial Sequence: Synthetic peptide"
  MOD_RES (9)..(9): Citrulline
DLLELIKTXGALHEDE

SEQ ID NO: 7011 - protein, 16 aa, Artificial Sequence
  source: /note="Description of Artificial Sequence: Synthetic peptide"
  MOD_RES (5)..(5): Citrulline
  MOD_RES (14)..(14): Citrulline
LIKTXGALHEDEAXKK

SEQ ID NO: 7012 - protein, 16 aa, Artificial Sequence
  source: /note="Description of Artificial Sequence: Synthetic peptide"
  MOD_RES (13)..(13): Citrulline
EILSHCWMQPKAXGSP

SEQ ID NO: 7013 - protein, 16 aa, Artificial Sequence
  source: /note="Description of Artificial Sequence: Synthetic peptide"
  MOD_RES (9)..(9): Citrulline
HCWMQPKAXGSPSVAI

SEQ ID NO: 7014 - protein, 16 aa, Artificial Sequence
  source: /note="Description of Artificial Sequence: Synthetic peptide"
  MOD_RES (5)..(5): Citrulline
QPKAXGSPSVAINKEG

SEQ ID NO: 7015 - protein, 16 aa, Artificial Sequence
  source: /note="Description of Artificial Sequence: Synthetic peptide"
  MOD_RES (8)..(8): Citrulline
DLHSLVIXGASMVQQF

SEQ ID NO: 7016 - protein, 16 aa, Artificial Sequence
  source: /note="Description of Artificial Sequence: Synthetic peptide"
  MOD_RES (4)..(4): Citrulline
LVIXGASMVQQFPNLT

SEQ ID NO: 7017 - protein, 16 aa, Artificial Sequence
  source: /note="Description of Artificial Sequence: Synthetic peptide"
  MOD_RES (6)..(6): Citrulline
  MOD_RES (11)..(11): Citrulline
VNEQSXNQKPXGTLQL

SEQ ID NO: 7018 - protein, 16 aa, Artificial Sequence
  source: /note="Description of Artificial Sequence: Synthetic peptide"
  MOD_RES (2)..(2): Citrulline
  MOD_RES (7)..(7): Citrulline
SXNQKPXGTLQLAGAV

SEQ ID NO: 7019 - protein, 16 aa, Artificial Sequence
  source: /note="Description of Artificial Sequence: Synthetic peptide"
  MOD_RES (3)..(3): Citrulline
KPXGTLQLAGAVISPS

SEQ ID NO: 7020 - protein, 16 aa, Artificial Sequence
  source: /note="Description of Artificial Sequence: Synthetic peptide"
  MOD_RES (11)..(11): Citrulline
  MOD_RES (13)..(13): Citrulline
SSGSEKLLCPXGXTLQ

SEQ ID NO: 7021 - protein, 16 aa, Artificial Sequence
  source: /note="Description of Artificial Sequence: Synthetic peptide"
  MOD_RES (7)..(7): Citrulline
  MOD_RES (9)..(9): Citrulline
EKLLCPXGXTLQETMP

SEQ ID NO: 7022 - protein, 16 aa, Artificial Sequence
  source: /note="Description of Artificial Sequence: Synthetic peptide"
  MOD_RES (11)..(11): Citrulline
QFPFHEMFVSXGGHGQ

SEQ ID NO: 7023 - protein, 16 aa, Artificial Sequence
  source: /note="Description of Artificial Sequence: Synthetic peptide"
  MOD_RES (7)..(7): Citrulline
HEMFVSXGGHGQQDLF

SEQ ID NO: 7024 - protein, 16 aa, Artificial Sequence
  source: /note="Description of Artificial Sequence: Synthetic peptide"
  MOD_RES (11)..(11): Citrulline
SFAICASGQPXGNQLK

SEQ ID NO: 7025 - protein, 16 aa, Artificial Sequence
  source: /note="Description of Artificial Sequence: Synthetic peptide"
  MOD_RES (7)..(7): Citrulline
CASGQPXGNQLKGENY

SEQ ID NO: 7026 - protein, 16 aa, Artificial Sequence
  source: /note="Description of Artificial Sequence: Synthetic peptide"
  MOD_RES (10)..(10): Citrulline
KCCHGDYSFXGYQGPP

SEQ ID NO: 7027 - protein, 16 aa, Artificial Sequence
  source: /note="Description of Artificial Sequence: Synthetic peptide"
  MOD_RES (6)..(6): Citrulline
GDYSFXGYQGPPGPPG

SEQ ID NO: 7028 - protein, 16 aa, Artificial Sequence
  source: /note="Description of Artificial Sequence: Synthetic peptide"
  MOD_RES (7)..(7): Citrulline
  MOD_RES (10)..(10): Citrulline
KGDLGPXGEXGQHGPK

SEQ ID NO: 7029 - protein, 16 aa, Artificial Sequence
  source: /note="Description of Artificial Sequence: Synthetic peptide"
  MOD_RES (3)..(3): Citrulline
  MOD_RES (6)..(6): Citrulline
GPXGEXGQHGPKGEKG

SEQ ID NO: 7030 - protein, 16 aa, Artificial Sequence
  source: /note="Description of Artificial Sequence: Synthetic peptide"
  MOD_RES (10)..(10): Citrulline
QEEYEAWSQXGDIIQE

SEQ ID NO: 7031 - protein, 16 aa, Artificial Sequence
  source: /note="Description of Artificial Sequence: Synthetic peptide"
  MOD_RES (6)..(6): Citrulline
EAWSQXGDIIQEGEVS

SEQ ID NO: 7032 - protein, 16 aa, Artificial Sequence
  source: /note="Description of Artificial Sequence: Synthetic peptide"
  MOD_RES (8)..(8): Citrulline
  MOD_RES (11)..(11): Citrulline
AWEMDGPXENXGSFHK

SEQ ID NO: 7033 - protein, 16 aa, Artificial Sequence
  source: /note="Description of Artificial Sequence: Synthetic peptide"
  MOD_RES (4)..(4): Citrulline
  MOD_RES (7)..(7): Citrulline
DGPXENXGSFHKSLDQ

SEQ ID NO: 7034 - protein, 16 aa, Artificial Sequence
  source: /note="Description of Artificial Sequence: Synthetic peptide"
  MOD_RES (3)..(3): Citrulline
ENXGSFHKSLDQIFET

SEQ ID NO: 7035 - protein, 16 aa, Artificial Sequence
  source: /note="Description of Artificial Sequence: Synthetic peptide"
  MOD_RES (6)..(6): Citrulline
  MOD_RES (9)..(9): Citrulline
ALPPEXLSXGSGGTSQ

SEQ ID NO: 7036 - protein, 16 aa, Artificial Sequence
  source: /note="Description of Artificial Sequence: Synthetic peptide"
  MOD_RES (6)..(6): Citrulline
  MOD_RES (11)..(11): Citrulline
ANALVXAQQGXGTGGG

SEQ ID NO: 7037 - protein, 16 aa, Artificial Sequence
  source: /note="Description of Artificial Sequence: Synthetic peptide"
  MOD_RES (2)..(2): Citrulline
  MOD_RES (7)..(7): Citrulline
VXAQQGXGTGGGPGGP

SEQ ID NO: 7038 - protein, 16 aa, Artificial Sequence
  source: /note="Description of Artificial Sequence: Synthetic peptide"
  MOD_RES (5)..(5): Citrulline
  MOD_RES (12)..(12): Citrulline
YGAGXGNYDAFXGQGG

SEQ ID NO: 7039 - protein, 16 aa, Artificial Sequence
  source: /note="Description of Artificial Sequence: Synthetic peptide"
  MOD_RES (1)..(1): Citrulline
  MOD_RES (8)..(8): Citrulline
XGNYDAFXGQGGYPGK

SEQ ID NO: 7040 - protein, 16 aa, Artificial Sequence
  source: /note="Description of Artificial Sequence: Synthetic peptide"
  MOD_RES (12)..(12): Citrulline
LISQYNGYWPLXGEKV

SEQ ID NO: 7041 - protein, 16 aa, Artificial Sequence
  source: /note="Description of Artificial Sequence: Synthetic peptide"
  MOD_RES (8)..(8): Citrulline
  MOD_RES (14)..(14): Citrulline
YNGYWPLXGEKVIXYQ

SEQ ID NO: 7042 - protein, 16 aa, Artificial Sequence
  source: /note="Description of Artificial Sequence: Synthetic peptide"
  MOD_RES (11)..(11): Citrulline
  MOD_RES (14)..(14): Citrulline
SWPWGSLCPKXGHXAT

SEQ ID NO: 7043 - protein, 12 aa, Artificial Sequence
  source: /note="Description of Artificial Sequence: Synthetic peptide"
  MOD_RES (7)..(7): Citrulline
  MOD_RES (10)..(10): Citrulline
GSLCPKXGHXAT

SEQ ID NO: 7044 - protein, 16 aa, Artificial Sequence
  source: /note="Description of Artificial Sequence: Synthetic peptide"
  MOD_RES (11)..(11): Citrulline
TLYAELLGKPXGFQQQ

SEQ ID NO: 7045 - protein, 16 aa, Artificial Sequence
  source: /note="Description of Artificial Sequence: Synthetic peptide"
  MOD_RES (7)..(7): Citrulline
ELLGKPXGFQQQSNFY

SEQ ID NO: 7046 - protein, 16 aa, Artificial Sequence
  source: /note="Description of Artificial Sequence: Synthetic peptide"
  MOD_RES (3)..(3): Citrulline
KPXGFQQQSNFYPGFQ

SEQ ID NO: 7047 - protein, 16 aa, Artificial Sequence
  source: /note="Description of Artificial Sequence: Synthetic peptide"
  MOD_RES (6)..(6): Citrulline
  MOD_RES (11)..(11): Citrulline
IFHGVXGSEAXEGKSP

SEQ ID NO: 7048 - protein, 16 aa, Artificial Sequence
  source: /note="Description of Artificial Sequence: Synthetic peptide"
  MOD_RES (7)..(7): Citrulline
  MOD_RES (10)..(10): Citrulline
EKILEPXTTXGYKPPA

SEQ ID NO: 7049 - protein, 16 aa, Artificial Sequence
  source: /note="Description of Artificial Sequence: Synthetic peptide"
  MOD_RES (3)..(3): Citrulline
  MOD_RES (6)..(6): Citrulline
EPXTTXGYKPPAIPNM

SEQ ID NO: 7050 - protein, 16 aa, Artificial Sequence
  source: /note="Description of Artificial Sequence: Synthetic peptide"
  MOD_RES (2)..(2): Citrulline
TXGYKPPAIPNMNVFE

SEQ ID NO: 7051 - protein, 16 aa, Artificial Sequence
  source: /note="Description of Artificial Sequence: Synthetic peptide"
  MOD_RES (6)..(6): Citrulline
  MOD_RES (14)..(14): Citrulline
EACAVXGSDTLWYXGK

SEQ ID NO: 7052 - protein, 16 aa, Artificial Sequence
  source: /note="Description of Artificial Sequence: Synthetic peptide"
  MOD_RES (2)..(2): Citrulline
  MOD_RES (10)..(10): Citrulline
VXGSDTLWYXGKVMEV

SEQ ID NO: 7053 - protein, 16 aa, Artificial Sequence
  source: /note="Description of Artificial Sequence: Synthetic peptide"
  MOD_RES (6)..(6): Citrulline
DTLWYXGKVMEVVGGA

SEQ ID NO: 7054 - protein, 16 aa, Artificial Sequence
  source: /note="Description of Artificial Sequence: Synthetic peptide"
  MOD_RES (8)..(8): Citrulline
CDPTPSHXGQLNKEFT

SEQ ID NO: 7055 - protein, 16 aa, Artificial Sequence
  source: /note="Description of Artificial Sequence: Synthetic peptide"
  MOD_RES (4)..(4): Citrulline
PSHXGQLNKEFTGKEE

SEQ ID NO: 7056 - protein, 16 aa, Artificial Sequence
  source: /note="Description of Artificial Sequence: Synthetic peptide"
  MOD_RES (8)..(8): Citrulline
FYIEETLXGAINGEVG

SEQ ID NO: 7057 - protein, 16 aa, Artificial Sequence
  source: /note="Description of Artificial Sequence: Synthetic peptide"
  MOD_RES (4)..(4): Citrulline
ETLXGAINGEVGDLKQ

SEQ ID NO: 7058 - protein, 16 aa, Artificial Sequence
  source: /note="Description of Artificial Sequence: Synthetic peptide"
  MOD_RES (10)..(10): Citrulline
  MOD_RES (14)..(14): Citrulline
PPAGAGVSGXGLPXGV

SEQ ID NO: 7059 - protein, 16 aa, Artificial Sequence
  source: /note="Description of Artificial Sequence: Synthetic peptide"
  MOD_RES (6)..(6): Citrulline
  MOD_RES (10)..(10): Citrulline
AGVSGXGLPXGVDGQT

SEQ ID NO: 7060 - protein, 16 aa, Artificial Sequence
  source: /note="Description of Artificial Sequence: Synthetic peptide"
  MOD_RES (2)..(2): Citrulline
  MOD_RES (6)..(6): Citrulline
GXGLPXGVDGQTGSGT

SEQ ID NO: 7061 - protein, 16 aa, Artificial Sequence
  source: /note="Description of Artificial Sequence: Synthetic peptide"
  MOD_RES (12)..(12): Citrulline
GNGKVDYGEFKXGIIG

SEQ ID NO: 7062 - protein, 16 aa, Artificial Sequence
  source: /note="Description of Artificial Sequence: Synthetic peptide"
  MOD_RES (8)..(8): Citrulline
VDYGEFKXGIIGEMNE

SEQ ID NO: 7063 - protein, 16 aa, Artificial Sequence
  source: /note="Description of Artificial Sequence: Synthetic peptide"
  MOD_RES (4)..(4): Citrulline
  MOD_RES (14)..(14): Citrulline
EFKXGIIGEMNEYXKS

SEQ ID NO: 7064 - protein, 16 aa, Artificial Sequence
  source: /note="Description of Artificial Sequence: Synthetic peptide"
  MOD_RES (6)..(6): Citrulline
GFGNLXGQMEVWDVKN

SEQ ID NO: 7065 - protein, 16 aa, Artificial Sequence
  source: /note="Description of Artificial Sequence: Synthetic peptide"
  MOD_RES (2)..(2): Citrulline
LXGQMEVWDVKNYKLI

SEQ ID NO: 7066 - protein, 16 aa, Artificial Sequence
  source: /note="Description of Artificial Sequence: Synthetic peptide"
  MOD_RES (5)..(5): Citrulline
  MOD_RES (10)..(10): Citrulline
PGLLXSLLEXGQQLGV

SEQ ID NO: 7067 - protein, 16 aa, Artificial Sequence
  source: /note="Description of Artificial Sequence: Synthetic peptide"
  MOD_RES (1)..(1): Citrulline
  MOD_RES (6)..(6): Citrulline
XSLLEXGQQLGVEVPE

SEQ ID NO: 7068 - protein, 16 aa, Artificial Sequence
  source: /note="Description of Artificial Sequence: Synthetic peptide"
  MOD_RES (6)..(6): Citrulline
  MOD_RES (13)..(13): Citrulline
ALWSHXGSEDGPXPQS

SEQ ID NO: 7069 - protein, 16 aa, Artificial Sequence
  source: /note="Description of Artificial Sequence: Synthetic peptide"
  MOD_RES (13)..(13): Citrulline
  MOD_RES (15)..(15): Citrulline
DALNYGLFQPPSXGXA

SEQ ID NO: 7070 - protein, 16 aa, Artificial Sequence
  source: /note="Description of Artificial Sequence: Synthetic peptide"
  MOD_RES (9)..(9): Citrulline
  MOD_RES (11)..(11): Citrulline
YGLFQPPSXGXAGKFL

SEQ ID NO: 7071 - protein, 16 aa, Artificial Sequence
  source: /note="Description of Artificial Sequence: Synthetic peptide"
  MOD_RES (1)..(1): Citrulline
  MOD_RES (11)..(11): Citrulline
XDHEGFGFVLXGAKAE

SEQ ID NO: 7072 - protein, 16 aa, Artificial Sequence
  source: /note="Description of Artificial Sequence: Synthetic peptide"
  MOD_RES (7)..(7): Citrulline
GFGFVLXGAKAETPIE

SEQ ID NO: 7073 - protein, 16 aa, Artificial Sequence
  source: /note="Description of Artificial Sequence: Synthetic peptide"
  MOD_RES (9)..(9): Citrulline
QMHDFYKEXGLEVPKP

SEQ ID NO: 7074 - protein, 16 aa, Artificial Sequence
  source: /note="Description of Artificial Sequence: Synthetic peptide"
  MOD_RES (5)..(5): Citrulline
FYKEXGLEVPKPAVPQ

SEQ ID NO: 7075 - protein, 16 aa, Artificial Sequence
  source: /note="Description of Artificial Sequence: Synthetic peptide"
  MOD_RES (11)..(11): Citrulline
VNGVDGYDYSXGQLIE

SEQ ID NO: 7076 - protein, 16 aa, Artificial Sequence
  source: /note="Description of Artificial Sequence: Synthetic peptide"
  MOD_RES (7)..(7): Citrulline
DGYDYSXGQLIEDVEH

SEQ ID NO: 7077 - protein, 16 aa, Artificial Sequence
  source: /note="Description of Artificial Sequence: Synthetic peptide"
  MOD_RES (3)..(3): Citrulline
YSXGQLIEDVEHTFEE

SEQ ID NO: 7078 - protein, 16 aa, Artificial Sequence
  source: /note="Description of Artificial Sequence: Synthetic peptide"
  MOD_RES (9)..(9): Citrulline
  MOD_RES (12)..(12): Citrulline
TTSHTELVXGAXITYQ

SEQ ID NO: 7079 - protein, 16 aa, Artificial Sequence
  source: /note="Description of Artificial Sequence: Synthetic peptide"
  MOD_RES (5)..(5): Citrulline
  MOD_RES (8)..(8): Citrulline
TELVXGAXITYQCDPG

SEQ ID NO: 7080 - protein, 16 aa, Artificial Sequence
  source: /note="Description of Artificial Sequence: Synthetic peptide"
  MOD_RES (15)..(15): Citrulline
QVFSPPQKCQPFQVXG

SEQ ID NO: 7081 - protein, 16 aa, Artificial Sequence
  source: /note="Description of Artificial Sequence: Synthetic peptide"
  MOD_RES (11)..(11): Citrulline
PPQKCQPFQVXGSQQM

SEQ ID NO: 7082 - protein, 16 aa, Artificial Sequence
  source: /note="Description of Artificial Sequence: Synthetic peptide"
  MOD_RES (7)..(7): Citrulline
CQPFQVXGSQQMIDQA

SEQ ID NO: 7083 - protein, 16 aa, Artificial Sequence
  source: /note="Description of Artificial Sequence: Synthetic peptide"
  MOD_RES (3)..(3): Citrulline
QVXGSQQMIDQASLYQ

SEQ ID NO: 7084 - protein, 16 aa, Artificial Sequence
  source: /note="Description of Artificial Sequence: Synthetic peptide"
  MOD_RES (10)..(10): Citrulline
EAEQLGGLQXGDLLTP

SEQ ID NO: 7085 - protein, 16 aa, Artificial Sequence
  source: /note="Description of Artificial Sequence: Synthetic peptide"
  MOD_RES (6)..(6): Citrulline
LGGLQXGDLLTPPAPD

SEQ ID NO: 7086 - protein, 16 aa, Artificial Sequence
  source: /note="Description of Artificial Sequence: Synthetic peptide"
  MOD_RES (7)..(7): Citrulline
SSLSQIXGAVPTSLPQ

SEQ ID NO: 7087 - protein, 16 aa, Artificial Sequence
  source: /note="Description of Artificial Sequence: Synthetic peptide"
  MOD_RES (3)..(3): Citrulline
QIXGAVPTSLPQGLSL

SEQ ID NO: 7088 - protein, 16 aa, Artificial Sequence
  source: /note="Description of Artificial Sequence: Synthetic peptide"
  MOD_RES (13)..(13): Citrulline
DVFQASNPLWQSXGST

SEQ ID NO: 7089 - protein, 16 aa, Artificial Sequence
  source: /note="Description of Artificial Sequence: Synthetic peptide"
  MOD_RES (9)..(9): Citrulline
ASNPLWQSXGSTTVSS

SEQ ID NO: 7090 - protein, 16 aa, Artificial Sequence
  source: /note="Description of Artificial Sequence: Synthetic peptide"
  MOD_RES (13)..(13): Citrulline
DIFQASNPYLPTXGGT

SEQ ID NO: 7091 - protein, 16 aa, Artificial Sequence
  source: /note="Description of Artificial Sequence: Synthetic peptide"
  MOD_RES (9)..(9): Citrulline
ASNPYLPTXGGTTMAS

SEQ ID NO: 7092 - protein, 16 aa, Artificial Sequence
  source: /note="Description of Artificial Sequence: Synthetic peptide"
  MOD_RES (5)..(5): Citrulline
  MOD_RES (15)..(15): Citrulline
YLPTXGGTTMASGGXF

SEQ ID NO: 7093 - protein, 16 aa, Artificial Sequence
  source: /note="Description of Artificial Sequence: Synthetic peptide"
  MOD_RES (7)..(7): Citrulline
IATSKIXGKAFSDGIS

SEQ ID NO: 7094 - protein, 16 aa, Artificial Sequence
  source: /note="Description of Artificial Sequence: Synthetic peptide"
  MOD_RES (3)..(3): Citrulline
KIXGKAFSDGISWEPQ

SEQ ID NO: 7095 - protein, 16 aa, Artificial Sequence
  source: /note="Description of Artificial Sequence: Synthetic peptide"
  MOD_RES (12)..(12): Citrulline
NSSNSLKPGLAXGQIK

SEQ ID NO: 7096 - protein, 16 aa, Artificial Sequence
  source: /note="Description of Artificial Sequence: Synthetic peptide"
  MOD_RES (8)..(8): Citrulline
SLKPGLAXGQIKSEPP

SEQ ID NO: 7097 - protein, 16 aa, Artificial Sequence
  source: /note="Description of Artificial Sequence: Synthetic peptide"
  MOD_RES (4)..(4): Citrulline
GLAXGQIKSEPPSEEN

SEQ ID NO: 7098 - protein, 16 aa, Artificial Sequence
  source: /note="Description of Artificial Sequence: Synthetic peptide"
  MOD_RES (8)..(9): Citrulline
PPNELGFXXGSSYSKH

SEQ ID NO: 7099 - protein, 16 aa, Artificial Sequence
  source: /note="Description of Artificial Sequence: Synthetic peptide"
  MOD_RES (4)..(5): Citrulline
LGFXXGSSYSKHDSSA

SEQ ID NO: 7100 - protein, 16 aa, Artificial Sequence
  source: /note="Description of Artificial Sequence: Synthetic peptide"
  MOD_RES (7)..(7): Citrulline
NTMHNIXGNKQAQGTG

SEQ ID NO: 7101 - protein, 16 aa, Artificial Sequence
  source: /note="Description of Artificial Sequence: Synthetic peptide"
  MOD_RES (6)..(6): Citrulline
EAQSKXGMLTLKYPME

SEQ ID NO: 7102 - protein, 16 aa, Artificial Sequence
  source: /note="Description of Artificial Sequence: Synthetic peptide"
  MOD_RES (2)..(2): Citrulline
KXGMLTLKYPMEHGII

SEQ ID NO: 7103 - protein, 16 aa, Artificial Sequence
  source: /note="Description of Artificial Sequence: Synthetic peptide"
  MOD_RES (2)..(2): Citrulline
  MOD_RES (10)..(10): Citrulline
LXQSVSEVVXGSVLLA

SEQ ID NO: 7104 - protein, 16 aa, Artificial Sequence
  source: /note="Description of Artificial Sequence: Synthetic peptide"
  MOD_RES (6)..(6): Citrulline
VSEVVXGSVLLAKPKL

SEQ ID NO: 7105 - protein, 16 aa, Artificial Sequence
  source: /note="Description of Artificial Sequence: Synthetic peptide"
  MOD_RES (2)..(2): Citrulline
VXGSVLLAKPKLIEPL

SEQ ID NO: 7106 - protein, 16 aa, Artificial Sequence
  source: /note="Description of Artificial Sequence: Synthetic peptide"
  MOD_RES (4)..(4): Citrulline
  MOD_RES (9)..(9): Citrulline
NSVXNADSXGSLISTD

SEQ ID NO: 7107 - protein, 16 aa, Artificial Sequence
  source: /note="Description of Artificial Sequence: Synthetic peptide"
  MOD_RES (5)..(5): Citrulline
NADSXGSLISTDSGNS

SEQ ID NO: 7108 - protein, 16 aa, Artificial Sequence
  source: /note="Description of Artificial Sequence: Synthetic peptide"
  MOD_RES (10)..(10): Citrulline
  MOD_RES (13)..(13): Citrulline
DKPAQGFLHXGGXKPV

SEQ ID NO: 7109 - protein, 16 aa, Artificial Sequence
  source: /note="Description of Artificial Sequence: Synthetic peptide"
  MOD_RES (6)..(6): Citrulline
  MOD_RES (9)..(9): Citrulline
QGFLHXGGXKPVSVAI

SEQ ID NO: 7110 - protein, 16 aa, Artificial Sequence
  source: /note="Description of Artificial Sequence: Synthetic peptide"
  MOD_RES (10)..(10): Citrulline
  MOD_RES (13)..(13): Citrulline
DKPAQGFLHXGGXKSV

SEQ ID NO: 7111 - protein, 16 aa, Artificial Sequence
  source: /note="Description of Artificial Sequence: Synthetic peptide"
  MOD_RES (6)..(6): Citrulline
  MOD_RES (9)..(9): Citrulline
QGFLHXGGXKSVSVAI

SEQ ID NO: 7112 - protein, 16 aa, Artificial Sequence
  source: /note="Description of Artificial Sequence: Synthetic peptide"
  MOD_RES (10)..(10): Citrulline
SSNGEPLVGXGLKKQW

SEQ ID NO: 7113 - protein, 16 aa, Artificial Sequence
  source: /note="Description of Artificial Sequence: Synthetic peptide"
  MOD_RES (6)..(6): Citrulline
EPLVGXGLKKQWSTSS

SEQ ID NO: 7114 - protein, 16 aa, Artificial Sequence
  source: /note="Description of Artificial Sequence: Synthetic peptide"
  MOD_RES (10)..(11): Citrulline
PVSESQSSSXXGSVVS

SEQ ID NO: 7115 - protein, 16 aa, Artificial Sequence
  source: /note="Description of Artificial Sequence: Synthetic peptide"
  MOD_RES (6)..(7): Citrulline
SQSSSXXGSVVSMQDN

SEQ ID NO: 7116 - protein, 16 aa, Artificial Sequence
  source: /note="Description of Artificial Sequence: Synthetic peptide"
  MOD_RES (2)..(3): Citrulline
SXXGSVVSMQDNDLLS

SEQ ID NO: 7117 - protein, 16 aa, Artificial Sequence
  source: /note="Description of Artificial Sequence: Synthetic peptide"
  MOD_RES (8)..(9): Citrulline
YSSVQVPXXGAILPML

SEQ ID NO: 7118 - protein, 16 aa, Artificial Sequence
  source: /note="Description of Artificial Sequence: Synthetic peptide"
  MOD_RES (14)..(14): Citrulline
GSDLVDKFPAPSVXGS

SEQ ID NO: 7119 - protein, 16 aa, Artificial Sequence
  source: /note="Description of Artificial Sequence: Synthetic peptide"
  MOD_RES (10)..(10): Citrulline
  MOD_RES (13)..(13): Citrulline
VDKFPAPSVXGSXLDT

SEQ ID NO: 7120 - protein, 16 aa, Artificial Sequence
  source: /note="Description of Artificial Sequence: Synthetic peptide"
  MOD_RES (13)..(13): Citrulline
LSPSQYHNYTQPXGNF

SEQ ID NO: 7121 - protein, 16 aa, Artificial Sequence
  source: /note="Description of Artificial Sequence: Synthetic peptide"
  MOD_RES (9)..(9): Citrulline
QYHNYTQPXGNFIPYA

SEQ ID NO: 7122 - protein, 16 aa, Artificial Sequence
  source: /note="Description of Artificial Sequence: Synthetic peptide"
  MOD_RES (5)..(5): Citrulline
  MOD_RES (16)..(16): Citrulline
YTQPXGNFIPYANEEX

SEQ ID NO: 7123 - protein, 16 aa, Artificial Sequence
  source: /note="Description of Artificial Sequence: Synthetic peptide"
  MOD_RES (3)..(3): Citrulline
  MOD_RES (11)..(11): Citrulline
WNXESLLLQVXGSGGA

SEQ ID NO: 7124 - protein, 16 aa, Artificial Sequence
  source: /note="Description of Artificial Sequence: Synthetic peptide"
  MOD_RES (7)..(7): Citrulline
  MOD_RES (13)..(13): Citrulline
SLLLQVXGSGGAXLST

SEQ ID NO: 7125 - protein, 16 aa, Artificial Sequence
  source: /note="Description of Artificial Sequence: Synthetic peptide"
  MOD_RES (8)..(8): Citrulline
VTGEAALXGTTLQSLG

SEQ ID NO: 7126 - protein, 16 aa, Artificial Sequence
  source: /note="Description of Artificial Sequence: Synthetic peptide"
  MOD_RES (4)..(4): Citrulline
AALXGTTLQSLGLTGG

SEQ ID NO: 7127 - protein, 16 aa, Artificial Sequence
  source: /note="Description of Artificial Sequence: Synthetic peptide"
  MOD_RES (4)..(4): Citrulline
  MOD_RES (10)..(10): Citrulline
GEAXLTFLNXGEDYVM

SEQ ID NO: 7128 - protein, 16 aa, Artificial Sequence
  source: /note="Description of Artificial Sequence: Synthetic peptide"
  MOD_RES (6)..(6): Citrulline
LTFLNXGEDYVMTMPY

SEQ ID NO: 7129 - protein, 16 aa, Artificial Sequence
  source: /note="Description of Artificial Sequence: Synthetic peptide"
  MOD_RES (11)..(11): Citrulline
  MOD_RES (16)..(16): Citrulline
QSAIAGEEHPXGSILX

SEQ ID NO: 7130 - protein, 16 aa, Artificial Sequence
  source: /note="Description of Artificial Sequence: Synthetic peptide"
  MOD_RES (7)..(7): Citrulline
  MOD_RES (12)..(12): Citrulline
AGEEHPXGSILXEVHL

SEQ ID NO: 7131 - protein, 16 aa, Artificial Sequence
  source: /note="Description of Artificial Sequence: Synthetic peptide"
  MOD_RES (9)..(9): Citrulline
  MOD_RES (12)..(12): Citrulline
AASVTAQAXGQXSVLQ

SEQ ID NO: 7132 - protein, 16 aa, Artificial Sequence
  source: /note="Description of Artificial Sequence: Synthetic peptide"
  MOD_RES (5)..(5): Citrulline
  MOD_RES (8)..(8): Citrulline
TAQAXGQXSVLQVPLP

SEQ ID NO: 7133 - protein, 16 aa, Artificial Sequence
  source: /note="Description of Artificial Sequence: Synthetic peptide"
  MOD_RES (13)..(13): Citrulline
CPLCVTSHLHSSXGSV

SEQ ID NO: 7134 - protein, 16 aa, Artificial Sequence
  source: /note="Description of Artificial Sequence: Synthetic peptide"
  MOD_RES (9)..(9): Citrulline
VTSHLHSSXGSVGAGS

SEQ ID NO: 7135 - protein, 16 aa, Artificial Sequence
  source: /note="Description of Artificial Sequence: Synthetic peptide"
  MOD_RES (5)..(5): Citrulline
LHSSXGSVGAGSGGAG

SEQ ID NO: 7136 - protein, 16 aa, Artificial Sequence
  source: /note="Description of Artificial Sequence: Synthetic peptide"
  MOD_RES (1)..(1): Citrulline
XGSVGAGSGGAGAGVT

SEQ ID NO: 7137 - protein, 16 aa, Artificial Sequence
  source: /note="Description of Artificial Sequence: Synthetic peptide"
  MOD_RES (13)..(13): Citrulline
DGLDFDWEYPGSXGSP

SEQ ID NO: 7138 - protein, 16 aa, Artificial Sequence
  source: /note="Description of Artificial Sequence: Synthetic peptide"
  MOD_RES (9)..(9): Citrulline
FDWEYPGSXGSPPQDK

SEQ ID NO: 7139 - protein, 16 aa, Artificial Sequence
  source: /note="Description of Artificial Sequence: Synthetic peptide"
  MOD_RES (7)..(7): Citrulline
KIALIQXGQCMFAEKA

SEQ ID NO: 7140 - protein, 16 aa, Artificial Sequence
  source: /note="Description of Artificial Sequence: Synthetic peptide"
  MOD_RES (3)..(3): Citrulline
  MOD_RES (13)..(13): Citrulline
IQXGQCMFAEKAXNIQ

SEQ ID NO: 7141 - protein, 16 aa, Artificial Sequence
  source: /note="Description of Artificial Sequence: Synthetic peptide"
  MOD_RES (1)..(1): Citrulline
  MOD_RES (11)..(11): Citrulline
XDGNVSYAWYXGSKLI

SEQ ID NO: 7142 - protein, 16 aa, Artificial Sequence
  source: /note="Description of Artificial Sequence: Synthetic peptide"
  MOD_RES (7)..(7): Citrulline
VSYAWYXGSKLIQTAG

SEQ ID NO: 7143 - protein, 16 aa, Artificial Sequence
  source: /note="Description of Artificial Sequence: Synthetic peptide"
  MOD_RES (3)..(3): Citrulline
WYXGSKLIQTAGNLTY

SEQ ID NO: 7144 - protein, 16 aa, Artificial Sequence
  source: /note="Description of Artificial Sequence: Synthetic peptide"
  MOD_RES (10)..(10): Citrulline
  MOD_RES (12)..(12): Citrulline
SLALTTGPKXTXGGAP

SEQ ID NO: 7145 - protein, 16 aa, Artificial Sequence
  source: /note="Description of Artificial Sequence: Synthetic peptide"
  MOD_RES (6)..(6): Citrulline
  MOD_RES (8)..(8): Citrulline
TTGPKXTXGGAPELAP

SEQ ID NO: 7146 - protein, 16 aa, Artificial Sequence
  source: /note="Description of Artificial Sequence: Synthetic peptide"
  MOD_RES (9)..(9): Citrulline
FGPAAAVAXGYPKPLA

SEQ ID NO: 7147 - protein, 16 aa, Artificial Sequence
  source: /note="Description of Artificial Sequence: Synthetic peptide"
  MOD_RES (5)..(5): Citrulline
AAVAXGYPKPLAELPG

SEQ ID NO: 7148 - protein, 16 aa, Artificial Sequence
  source: /note="Description of Artificial Sequence: Synthetic peptide"
  MOD_RES (5)..(5): Citrulline
  MOD_RES (12)..(12): Citrulline
TKLSXSGKEKEXGSPL

SEQ ID NO: 7149 - protein, 16 aa, Artificial Sequence
  source: /note="Description of Artificial Sequence: Synthetic peptide"
  MOD_RES (1)..(1): Citrulline
  MOD_RES (8)..(8): Citrulline
XSGKEKEXGSPLLGDH

SEQ ID NO: 7150 - protein, 16 aa, Artificial Sequence
  source: /note="Description of Artificial Sequence: Synthetic peptide"
  MOD_RES (7)..(7): Citrulline
  MOD_RES (11)..(11): Citrulline
LGDHAVXGALXASPPS

SEQ ID NO: 7151 - protein, 16 aa, Artificial Sequence
  source: /note="Description of Artificial Sequence: Synthetic peptide"
  MOD_RES (3)..(3): Citrulline
  MOD_RES (7)..(7): Citrulline
AVXGALXASPPSFPSG

SEQ ID NO: 7152 - protein, 16 aa, Artificial Sequence
  source: /note="Description of Artificial Sequence: Synthetic peptide"
  MOD_RES (6)..(7): Citrulline
MSKLWXXGSTSGAMEA

SEQ ID NO: 7153 - protein, 16 aa, Artificial Sequence
  source: /note="Description of Artificial Sequence: Synthetic peptide"
  MOD_RES (2)..(3): Citrulline
WXXGSTSGAMEAPEPG

SEQ ID NO: 7154 - protein, 16 aa, Artificial Sequence
  source: /note="Description of Artificial Sequence: Synthetic peptide"
  MOD_RES (6)..(6): Citrulline
  MOD_RES (9)..(9): Citrulline
GGAHPXLAXGESYNCG

SEQ ID NO: 7155 - protein, 16 aa, Artificial Sequence
  source: /note="Description of Artificial Sequence: Synthetic peptide"
  MOD_RES (2)..(2): Citrulline
  MOD_RES (5)..(5): Citrulline
PXLAXGESYNCGYKPY

SEQ ID NO: 7156 - protein, 16 aa, Artificial Sequence
  source: /note="Description of Artificial Sequence: Synthetic peptide"
  MOD_RES (7)..(7): Citrulline
  MOD_RES (9)..(9): Citrulline
SVLHQTXSXGTKTDSK

SEQ ID NO: 7157 - protein, 16 aa, Artificial Sequence
  source: /note="Description of Artificial Sequence: Synthetic peptide"
  MOD_RES (3)..(3): Citrulline
  MOD_RES (5)..(5): Citrulline
QTXSXGTKTDSKIEGP

SEQ ID NO: 7158 - protein, 16 aa, Artificial Sequence
  source: /note="Description of Artificial Sequence: Synthetic peptide"
  MOD_RES (6)..(6): Citrulline
FCFFGXGSGGSMPPPL

SEQ ID NO: 7159 - protein, 16 aa, Artificial Sequence
  source: /note="Description of Artificial Sequence: Synthetic peptide"
  MOD_RES (3)..(3): Citrulline
  MOD_RES (9)..(9): Citrulline
MPXADGLYXGSPLVGD

SEQ ID NO: 7160 - protein, 16 aa, Artificial Sequence
  source: /note="Description of Artificial Sequence: Synthetic peptide"
  MOD_RES (5)..(5): Citrulline
  MOD_RES (13)..(13): Citrulline
DGLYXGSPLVGDXKPL

SEQ ID NO: 7161 - protein, 16 aa, Artificial Sequence
  source: /note="Description of Artificial Sequence: Synthetic peptide"
  MOD_RES (11)..(11): Citrulline
YEHGLMKDLSXGSLSP

SEQ ID NO: 7162 - protein, 16 aa, Artificial Sequence
  source: /note="Description of Artificial Sequence: Synthetic peptide"
  MOD_RES (7)..(7): Citrulline
  MOD_RES (16)..(16): Citrulline
LMKDLSXGSLSPGGEX

SEQ ID NO: 7163 - protein, 16 aa, Artificial Sequence
  source: /note="Description of Artificial Sequence: Synthetic peptide"
  MOD_RES (9)..(9): Citrulline
LTDIVSELXGQLLEAK

SEQ ID NO: 7164 - protein, 13 aa, Artificial Sequence
  source: /note="Description of Artificial Sequence: Synthetic peptide"
  MOD_RES (5)..(5): Citrulline
VSELXGQLLEAKP

SEQ ID NO: 7165 - protein, 16 aa, Artificial Sequence
  source: /note="Description of Artificial Sequence: Synthetic peptide"
  MOD_RES (5)..(5): Citrulline
  MOD_RES (7)..(7): Citrulline
VLVAXGXTTNEQVTGK

SEQ ID NO: 7166 - protein, 16 aa, Artificial Sequence
  source: /note="Description of Artificial Sequence: Synthetic peptide"
  MOD_RES (13)..(13): Citrulline
AAMPHSSSAKLSXGDS

SEQ ID NO: 7167 - protein, 16 aa, Artificial Sequence
  source: /note="Description of Artificial Sequence: Synthetic peptide"
  MOD_RES (9)..(9): Citrulline
HSSSAKLSXGDSLKEP

SEQ ID NO: 7168 - protein, 16 aa, Artificial Sequence
  source: /note="Description of Artificial Sequence: Synthetic peptide"
  MOD_RES (5)..(5): Citrulline
AKLSXGDSLKEPTSIA

SEQ ID NO: 7169 - protein, 16 aa, Artificial Sequence
  source: /note="Description of Artificial Sequence: Synthetic peptide"
  MOD_RES (8)..(8): Citrulline
NGVQAVVXGILEGAGA

SEQ ID NO: 7170 - protein, 16 aa, Artificial Sequence
  source: /note="Description of Artificial Sequence: Synthetic peptide"
  MOD_RES (4)..(4): Citrulline
AVVXGILEGAGAGAAG

SEQ ID NO: 7171 - protein, 16 aa, Artificial Sequence
  source: /note="Description of Artificial Sequence: Synthetic peptide"
  MOD_RES (13)..(13): Citrulline
VMTSDTSGICNLXGSK

SEQ ID NO: 7172 - protein, 16 aa, Artificial Sequence
  source: /note="Description of Artificial Sequence: Synthetic peptide"
  MOD_RES (9)..(9): Citrulline
  MOD_RES (15)..(15): Citrulline
DTSGICNLXGSKKVXP

SEQ ID NO: 7173 - protein, 16 aa, Artificial Sequence
  source: /note="Description of Artificial Sequence: Synthetic peptide"
  MOD_RES (8)..(8): Citrulline
SPQPSTSXGLLPEAGQ

SEQ ID NO: 7174 - protein, 16 aa, Artificial Sequence
  source: /note="Description of Artificial Sequence: Synthetic peptide"
  MOD_RES (4)..(4): Citrulline
  MOD_RES (16)..(16): Citrulline
STSXGLLPEAGQLAEX

SEQ ID NO: 7175 - protein, 16 aa, Artificial Sequence
  source: /note="Description of Artificial Sequence: Synthetic peptide"
  MOD_RES (2)..(2): Citrulline
  MOD_RES (8)..(8): Citrulline
SXEELIKXGVLKEIYD

SEQ ID NO: 7176 - protein, 16 aa, Artificial Sequence
  source: /note="Description of Artificial Sequence: Synthetic peptide"
  MOD_RES (4)..(4): Citrulline
LIKXGVLKEIYDKDGE

SEQ ID NO: 7177 - protein, 16 aa, Artificial Sequence
  source: /note="Description of Artificial Sequence: Synthetic peptide"
  MOD_RES (11)..(11): Citrulline
CVQDPVAAFKXGVLEP

SEQ ID NO: 7178 - protein, 16 aa, Artificial Sequence
  source: /note="Description of Artificial Sequence: Synthetic peptide"
  MOD_RES (7)..(7): Citrulline
PVAAFKXGVLEPLTNL

SEQ ID NO: 7179 - protein, 16 aa, Artificial Sequence
  source: /note="Description of Artificial Sequence: Synthetic peptide"
  MOD_RES (3)..(3): Citrulline
  MOD_RES (10)..(10): Citrulline
PGXDVPLQPXGSFKKP

SEQ ID NO: 7180 - protein, 16 aa, Artificial Sequence
  source: /note="Description of Artificial Sequence: Synthetic peptide"
  MOD_RES (6)..(6): Citrulline
VPLQPXGSFKKPSAKP

SEQ ID NO: 7181 - protein, 16 aa, Artificial Sequence
  source: /note="Description of Artificial Sequence: Synthetic peptide"
  MOD_RES (10)..(10): Citrulline
LQNFHDPLTXGQSYSH

SEQ ID NO: 7182 - protein, 16 aa, Artificial Sequence
  source: /note="Description of Artificial Sequence: Synthetic peptide"
  MOD_RES (6)..(6): Citrulline
HDPLTXGQSYSHEEPK

SEQ ID NO: 7183 - protein, 16 aa, Artificial Sequence
  source: /note="Description of Artificial Sequence: Synthetic peptide"
  MOD_RES (9)..(9): Citrulline
LAVAVIVKXGSLDKSI

SEQ ID NO: 7184 - protein, 16 aa, Artificial Sequence
  source: /note="Description of Artificial Sequence: Synthetic peptide"
  MOD_RES (5)..(5): Citrulline
VIVKXGSLDKSIDCKS

SEQ ID NO: 7185 - protein, 16 aa, Artificial Sequence
  source: /note="Description of Artificial Sequence: Synthetic peptide"
  MOD_RES (11)..(11): Citrulline
FSCNNPSTLPXGSQPM

SEQ ID NO: 7186 - protein, 16 aa, Artificial Sequence
  source: /note="Description of Artificial Sequence: Synthetic peptide"
  MOD_RES (7)..(7): Citrulline
  MOD_RES (15)..(15): Citrulline
NPSTLPXGSQPMSPXT

SEQ ID NO: 7187 - protein, 16 aa, Artificial Sequence
  source: /note="Description of Artificial Sequence: Synthetic peptide"
  MOD_RES (9)..(9): Citrulline
  MOD_RES (11)..(11): Citrulline
GITISSASXKXGEPLI

SEQ ID NO: 7188 - protein, 16 aa, Artificial Sequence
  source: /note="Description of Artificial Sequence: Synthetic peptide"
  MOD_RES (5)..(5): Citrulline
  MOD_RES (7)..(7): Citrulline
SSASXKXGEPLIISDI

SEQ ID NO: 7189 - protein, 16 aa, Artificial Sequence
  source: /note="Description of Artificial Sequence: Synthetic peptide"
  MOD_RES (1)..(1): Citrulline
  MOD_RES (11)..(11): Citrulline
XNVGSTFKDFXGSISK

SEQ ID NO: 7190 - protein, 16 aa, Artificial Sequence
  source: /note="Description of Artificial Sequence: Synthetic peptide"
  MOD_RES (7)..(7): Citrulline
STFKDFXGSISKQSGS

SEQ ID NO: 7191 - protein, 16 aa, Artificial Sequence
  source: /note="Description of Artificial Sequence: Synthetic peptide"
  MOD_RES (7)..(7): Citrulline
  MOD_RES (16)..(16): Citrulline
EWNFFLXGSAGLEKEX

SEQ ID NO: 7192 - protein, 16 aa, Artificial Sequence
  source: /note="Description of Artificial Sequence: Synthetic peptide"
  MOD_RES (12)..(12): Citrulline
GSCLQQEGYEHXGTPV

SEQ ID NO: 7193 - protein, 16 aa, Artificial Sequence
  source: /note="Description of Artificial Sequence: Synthetic peptide"
  MOD_RES (8)..(8): Citrulline
  MOD_RES (15)..(15): Citrulline
QQEGYEHXGTPVQGXL

SEQ ID NO: 7194 - protein, 16 aa, Artificial Sequence
  source: /note="Description of Artificial Sequence: Synthetic peptide"
  MOD_RES (4)..(4): Citrulline
  MOD_RES (11)..(11): Citrulline
YEHXGTPVQGXLKSHS

SEQ ID NO: 7195 - protein, 16 aa, Artificial Sequence
  source: /note="Description of Artificial Sequence: Synthetic peptide"
  MOD_RES (10)..(11): Citrulline
WSLCAPMSKXXGGVGV

SEQ ID NO: 7196 - protein, 16 aa, Artificial Sequence
  source: /note="Description of Artificial Sequence: Synthetic peptide"
  MOD_RES (6)..(7): Citrulline
APMSKXXGGVGVATYN

SEQ ID NO: 7197 - protein, 16 aa, Artificial Sequence
  source: /note="Description of Artificial Sequence: Synthetic peptide"
  MOD_RES (13)..(13): Citrulline
PFAYPGAGGLYKXGSV

SEQ ID NO: 7198 - protein, 16 aa, Artificial Sequence
  source: /note="Description of Artificial Sequence: Synthetic peptide"
  MOD_RES (9)..(9): Citrulline
  MOD_RES (13)..(13): Citrulline
PGAGGLYKXGSVXSLS

SEQ ID NO: 7199 - protein, 16 aa, Artificial Sequence
  source: /note="Description of Artificial Sequence: Synthetic peptide"
  MOD_RES (13)..(13): Citrulline
PPPHSPYSGPPSXGSP

SEQ ID NO: 7200 - protein, 16 aa, Artificial Sequence
  source: /note="Description of Artificial Sequence: Synthetic peptide"
  MOD_RES (9)..(9): Citrulline
  MOD_RES (14)..(14): Citrulline
SPYSGPPSXGSPVXQS

SEQ ID NO: 7201 - protein, 16 aa, Artificial Sequence
  source: /note="Description of Artificial Sequence: Synthetic peptide"
  MOD_RES (3)..(3): Citrulline
  MOD_RES (11)..(11): Citrulline
VSXLQMQLHLXGLQNS

SEQ ID NO: 7202 - protein, 16 aa, Artificial Sequence
  source: /note="Description of Artificial Sequence: Synthetic peptide"
  MOD_RES (5)..(5): Citrulline
  MOD_RES (12)..(12): Citrulline
ASDLXGQLQQLXKLQL

SEQ ID NO: 7203 - protein, 16 aa, Artificial Sequence
  source: /note="Description of Artificial Sequence: Synthetic peptide"
  MOD_RES (12)..(12): Citrulline
  MOD_RES (14)..(14): Citrulline
QKLSLEEHIKTXGXHS

SEQ ID NO: 7204 - protein, 16 aa, Artificial Sequence
  source: /note="Description of Artificial Sequence: Synthetic peptide"
  MOD_RES (8)..(8): Citrulline
  MOD_RES (10)..(10): Citrulline
LEEHIKTXGXHSVGFS

SEQ ID NO: 7205 - protein, 16 aa, Artificial Sequence
  source: /note="Description of Artificial Sequence: Synthetic peptide"
  MOD_RES (9)..(9): Citrulline
  MOD_RES (15)..(15): Citrulline
HCVLVPYAXGEVKPXT

SEQ ID NO: 7206 - protein, 16 aa, Artificial Sequence
  source: /note="Description of Artificial Sequence: Synthetic peptide"
  MOD_RES (5)..(5): Citrulline
  MOD_RES (11)..(11): Citrulline
VPYAXGEVKPXTAECV

SEQ ID NO: 7207 - protein, 16 aa, Artificial Sequence
  source: /note="Description of Artificial Sequence: Synthetic peptide"
  MOD_RES (12)..(12): Citrulline
QYGELLADKQKXGAFL

SEQ ID NO: 7208 - protein, 16 aa, Artificial Sequence
  source: /note="Description of Artificial Sequence: Synthetic peptide"
  MOD_RES (8)..(8): Citrulline
  MOD_RES (14)..(14): Citrulline
LLADKQKXGAFLKXAA

SEQ ID NO: 7209 - protein, 16 aa, Artificial Sequence
  source: /note="Description of Artificial Sequence: Synthetic peptide"
  MOD_RES (4)..(4): Citrulline
  MOD_RES (10)..(10): Citrulline
KQKXGAFLKXAAGGGD

SEQ ID NO: 7210 - protein, 16 aa, Artificial Sequence
  source: /note="Description of Artificial Sequence: Synthetic peptide"
  MOD_RES (11)..(12): Citrulline
GKDPNQFTISXXGGKA

SEQ ID NO: 7211 - protein, 16 aa, Artificial Sequence
  source: /note="Description of Artificial Sequence: Synthetic peptide"
  MOD_RES (7)..(8): Citrulline
NQFTISXXGGKASDVA

SEQ ID NO: 7212 - protein, 16 aa, Artificial Sequence
  source: /note="Description of Artificial Sequence: Synthetic peptide"
  MOD_RES (11)..(11): Citrulline
GGKASDVALPXGSSPS

SEQ ID NO: 7213 - protein, 16 aa, Artificial Sequence
  source: /note="Description of Artificial Sequence: Synthetic peptide"
  MOD_RES (7)..(7): Citrulline
SDVALPXGSSPSVLAV

SEQ ID NO: 7214 - protein, 16 aa, Artificial Sequence
  source: /note="Description of Artificial Sequence: Synthetic peptide"
  MOD_RES (11)..(11): Citrulline
  MOD_RES (13)..(13): Citrulline
VEKIVQGVQLXGXAQG

SEQ ID NO: 7215 - protein, 16 aa, Artificial Sequence
  source: /note="Description of Artificial Sequence: Synthetic peptide"
  MOD_RES (7)..(7): Citrulline
  MOD_RES (9)..(9): Citrulline
VQGVQLXGXAQGGGAL

SEQ ID NO: 7216 - protein, 16 aa, Artificial Sequence
  source: /note="Description of Artificial Sequence: Synthetic peptide"
  MOD_RES (10)..(10): Citrulline
SPPACSAFPXGTISKQ

SEQ ID NO: 7217 - protein, 16 aa, Artificial Sequence
  source: /note="Description of Artificial Sequence: Synthetic peptide"
  MOD_RES (6)..(6): Citrulline
CSAFPXGTISKQDVCK

SEQ ID NO: 7218 - protein, 16 aa, Artificial Sequence
  source: /note="Description of Artificial Sequence: Synthetic peptide"
  MOD_RES (2)..(2): Citrulline
PXGTISKQDVCKTLCT

SEQ ID NO: 7219 - protein, 16 aa, Artificial Sequence
  source: /note="Description of Artificial Sequence: Synthetic peptide"
  MOD_RES (14)..(14): Citrulline
KCELFQKTGSFKIXGA

SEQ ID NO: 7220 - protein, 16 aa, Artificial Sequence
  source: /note="Description of Artificial Sequence: Synthetic peptide"
  MOD_RES (10)..(10): Citrulline
FQKTGSFKIXGALNAV

SEQ ID NO: 7221 - protein, 16 aa, Artificial Sequence
  source: /note="Description of Artificial Sequence: Synthetic peptide"
  MOD_RES (6)..(6): Citrulline
  MOD_RES (13)..(13): Citrulline
GSFKIXGALNAVXSLV

SEQ ID NO: 7222 - protein, 16 aa, Artificial Sequence
  source: /note="Description of Artificial Sequence: Synthetic peptide"
  MOD_RES (6)..(6): Citrulline
  MOD_RES (11)..(11): Citrulline
DVSLGXYAYVXGGGDP

SEQ ID NO: 7223 - protein, 16 aa, Artificial Sequence
  source: /note="Description of Artificial Sequence: Synthetic peptide"
  MOD_RES (2)..(2): Citrulline
  MOD_RES (7)..(7): Citrulline
GXYAYVXGGGDPWTNG

SEQ ID NO: 7224 - protein, 16 aa, Artificial Sequence
  source: /note="Description of Artificial Sequence: Synthetic peptide"
  MOD_RES (3)..(3): Citrulline
YVXGGGDPWTNGSGLA

SEQ ID NO: 7225 - protein, 16 aa, Artificial Sequence
  source: /note="Description of Artificial Sequence: Synthetic peptide"
  MOD_RES (14)..(15): Citrulline
IAQCQDSPTSGKFXXG

SEQ ID NO: 7226 - protein, 16 aa, Artificial Sequence
  source: /note="Description of Artificial Sequence: Synthetic peptide"
  MOD_RES (10)..(11): Citrulline
QDSPTSGKFXXGSGSA

SEQ ID NO: 7227 - protein, 16 aa, Artificial Sequence
  source: /note="Description of Artificial Sequence: Synthetic peptide"
  MOD_RES (6)..(7): Citrulline
TSGKFXXGSGSACSLL

SEQ ID NO: 7228 - protein, 16 aa, Artificial Sequence
  source: /note="Description of Artificial Sequence: Synthetic peptide"
  MOD_RES (3)..(3): Citrulline
  MOD_RES (11)..(11): Citrulline
SKXSAYPSTSXGLKTM

SEQ ID NO: 7229 - protein, 16 aa, Artificial Sequence
  source: /note="Description of Artificial Sequence: Synthetic peptide"
  MOD_RES (7)..(7): Citrulline
AYPSTSXGLKTMPEAK

SEQ ID NO: 7230 - protein, 16 aa, Artificial Sequence
  source: /note="Description of Artificial Sequence: Synthetic peptide"
  MOD_RES (4)..(4): Citrulline
  MOD_RES (9)..(9): Citrulline
AEHXKIHAXGYLVECK

SEQ ID NO: 7231 - protein, 16 aa, Artificial Sequence
  source: /note="Description of Artificial Sequence: Synthetic peptide"
  MOD_RES (11)..(11): Citrulline
SLKEHQKIHTXGNPFE

SEQ ID NO: 7232 - protein, 16 aa, Artificial Sequence
  source: /note="Description of Artificial Sequence: Synthetic peptide"
  MOD_RES (1)..(1): Citrulline
  MOD_RES (8)..(8): Citrulline
XKNLFEGXGYEKSVIH

SEQ ID NO: 7233 - protein, 16 aa, Artificial Sequence
  source: /note="Description of Artificial Sequence: Synthetic peptide"
  MOD_RES (12)..(12): Citrulline
LCSPPACSAFPXGAIS

SEQ ID NO: 7234 - protein, 16 aa, Artificial Sequence
  source: /note="Description of Artificial Sequence: Synthetic peptide"
  MOD_RES (8)..(8): Citrulline
PACSAFPXGAISSEAV

SEQ ID NO: 7235 - protein, 16 aa, Artificial Sequence
  source: /note="Description of Artificial Sequence: Synthetic peptide"
  MOD_RES (2)..(2): Citrulline
  MOD_RES (8)..(8): Citrulline
AXEPGWTXGSEEGSPK

SEQ ID NO: 7236 - protein, 16 aa, Artificial Sequence
  source: /note="Description of Artificial Sequence: Synthetic peptide"
  MOD_RES (4)..(4): Citrulline
GWTXGSEEGSPKLQHE

SEQ ID NO: 7237 - protein, 16 aa, Artificial Sequence
  source: /note="Description of Artificial Sequence: Synthetic peptide"
  MOD_RES (3)..(3): Citrulline
  MOD_RES (14)..(14): Citrulline
GGXPGTSPALFSGXGA

SEQ ID NO: 7238 - protein, 16 aa, Artificial Sequence
  source: /note="Description of Artificial Sequence: Synthetic peptide"
  MOD_RES (10)..(10): Citrulline
GTSPALFSGXGAATGG

SEQ ID NO: 7239 - protein, 16 aa, Artificial Sequence
  source: /note="Description of Artificial Sequence: Synthetic peptide"
  MOD_RES (6)..(6): Citrulline
  MOD_RES (13)..(13): Citrulline
ALFSGXGAATGGXQGG

SEQ ID NO: 7240 - protein, 16 aa, Artificial Sequence
  source: /note="Description of Artificial Sequence: Synthetic peptide"
  MOD_RES (10)..(10): Citrulline
IVIVMEYASXGDLYDY

SEQ ID NO: 7241 - protein, 16 aa, Artificial Sequence
  source: /note="Description of Artificial Sequence: Synthetic peptide"
  MOD_RES (6)..(6): Citrulline
  MOD_RES (16)..(16): Citrulline
MEYASXGDLYDYISEX

SEQ ID NO: 7242 - protein, 16 aa, Artificial Sequence
  source: /note="Description of Artificial Sequence: Synthetic peptide"
  MOD_RES (6)..(6): Citrulline
  MOD_RES (8)..(8): Citrulline
ALTAAXGXGKSAALGL

SEQ ID NO: 7243 - protein, 16 aa, Artificial Sequence
  source: /note="Description of Artificial Sequence: Synthetic peptide"
  MOD_RES (2)..(2): Citrulline
  MOD_RES (4)..(4): Citrulline
AXGXGKSAALGLAIAG

SEQ ID NO: 7244 - protein, 16 aa, Artificial Sequence
  source: /note="Description of Artificial Sequence: Synthetic peptide"
  MOD_RES (11)..(11): Citrulline
VPVDMAVTLPXGQLAA

SEQ ID NO: 7245 - protein, 16 aa, Artificial Sequence
  source: /note="Description of Artificial Sequence: Synthetic peptide"
  MOD_RES (7)..(7): Citrulline
MAVTLPXGQLAAPLTN

SEQ ID NO: 7246 - protein, 16 aa, Artificial Sequence
  source: /note="Description of Artificial Sequence: Synthetic peptide"
  MOD_RES (7)..(7): Citrulline
  MOD_RES (13)..(13): Citrulline
GGQSWNXAWEPAXGAA

SEQ ID NO: 7247 - protein, 16 aa, Artificial Sequence
  source: /note="Description of Artificial Sequence: Synthetic peptide"
  MOD_RES (3)..(3): Citrulline
  MOD_RES (9)..(9): Citrulline
WNXAWEPAXGAASWDT

SEQ ID NO: 7248 - protein, 16 aa, Artificial Sequence
  source: /note="Description of Artificial Sequence: Synthetic peptide"
  MOD_RES (5)..(5): Citrulline
  MOD_RES (14)..(14): Citrulline
WEPAXGAASWDTWXNK

SEQ ID NO: 7249 - protein, 16 aa, Artificial Sequence
  source: /note="Description of Artificial Sequence: Synthetic peptide"
  MOD_RES (7)..(7): Citrulline
MLHNKLXGQVQPQASN

SEQ ID NO: 7250 - protein, 16 aa, Artificial Sequence
  source: /note="Description of Artificial Sequence: Synthetic peptide"
  MOD_RES (3)..(3): Citrulline
KLXGQVQPQASNMEYM

SEQ ID NO: 7251 - protein, 16 aa, Artificial Sequence
  source: /note="Description of Artificial Sequence: Synthetic peptide"
  MOD_RES (4)..(4): Citrulline
  MOD_RES (11)..(11): Citrulline
SDVXFVLGKGXGAAAA

SEQ ID NO: 7252 - protein, 16 aa, Artificial Sequence
  source: /note="Description of Artificial Sequence: Synthetic peptide"
  MOD_RES (7)..(7): Citrulline
FVLGKGXGAAAAGGPQ

SEQ ID NO: 7253 - protein, 16 aa, Artificial Sequence
  source: /note="Description of Artificial Sequence: Synthetic peptide"
  MOD_RES (5)..(5): Citrulline
  MOD_RES (13)..(13): Citrulline
AACNXLANKAVQXGSA

SEQ ID NO: 7254 - protein, 16 aa, Artificial Sequence
  source: /note="Description of Artificial Sequence: Synthetic peptide"
  MOD_RES (1)..(1): Citrulline
  MOD_RES (9)..(9): Citrulline
XLANKAVQXGSADNVT

SEQ ID NO: 7255 - protein, 16 aa, Artificial Sequence
  source: /note="Description of Artificial Sequence: Synthetic peptide"
  MOD_RES (12)..(12): Citrulline
MCFHSDQWPSPXGKQE

SEQ ID NO: 7256 - protein, 16 aa, Artificial Sequence
  source: /note="Description of Artificial Sequence: Synthetic peptide"
  MOD_RES (8)..(8): Citrulline
SDQWPSPXGKQEPQVF

SEQ ID NO: 7257 - protein, 16 aa, Artificial Sequence
  source: /note="Description of Artificial Sequence: Synthetic peptide"
  MOD_RES (4)..(4): Citrulline
PSPXGKQEPQVFGTEF

SEQ ID NO: 7258 - protein, 16 aa, Artificial Sequence
  source: /note="Description of Artificial Sequence: Synthetic peptide"
  MOD_RES (4)..(4): Citrulline
  MOD_RES (12)..(12): Citrulline
AAFXTLGHVMPXGSGT

SEQ ID NO: 7259 - protein, 16 aa, Artificial Sequence
  source: /note="Description of Artificial Sequence: Synthetic peptide"
  MOD_RES (8)..(8): Citrulline
TLGHVMPXGSGTGIYS

SEQ ID NO: 7260 - protein, 16 aa, Artificial Sequence
  source: /note="Description of Artificial Sequence: Synthetic peptide"
  MOD_RES (4)..(4): Citrulline
VMPXGSGTGIYSNAAP

SEQ ID NO: 7261 - protein, 16 aa, Artificial Sequence
  source: /note="Description of Artificial Sequence: Synthetic peptide"
  MOD_RES (7)..(7): Citrulline
  MOD_RES (11)..(11): Citrulline
YQGNLYXPLLXGQAQI

SEQ ID NO: 7262 - protein, 16 aa, Artificial Sequence
  source: /note="Description of Artificial Sequence: Synthetic peptide"
  MOD_RES (3)..(3): Citrulline
  MOD_RES (7)..(7): Citrulline
LYXPLLXGQAQIPKLM

SEQ ID NO: 7263 - protein, 16 aa, Artificial Sequence
  source: /note="Description of Artificial Sequence: Synthetic peptide"
  MOD_RES (5)..(5): Citrulline
  MOD_RES (12)..(12): Citrulline
NLAEXLGEAKPXGLTK

SEQ ID NO: 7264 - protein, 16 aa, Artificial Sequence
  source: /note="Description of Artificial Sequence: Synthetic peptide"
  MOD_RES (1)..(1): Citrulline
  MOD_RES (8)..(8): Citrulline
XLGEAKPXGLTKADIE

SEQ ID NO: 7265 - protein, 16 aa, Artificial Sequence
  source: /note="Description of Artificial Sequence: Synthetic peptide"
  MOD_RES (3)..(3): Citrulline
  MOD_RES (9)..(9): Citrulline
AQXWAVLVXGATVEGQ

SEQ ID NO: 7266 - protein, 16 aa, Artificial Sequence
  source: /note="Description of Artificial Sequence: Synthetic peptide"
  MOD_RES (5)..(5): Citrulline
AVLVXGATVEGQNGSK

SEQ ID NO: 7267 - protein, 16 aa, Artificial Sequence
  source: /note="Description of Artificial Sequence: Synthetic peptide"
  MOD_RES (14)..(14): Citrulline
LSEEQKSALAFLNXGQ

SEQ ID NO: 7268 - protein, 16 aa, Artificial Sequence
  source: /note="Description of Artificial Sequence: Synthetic peptide"
  MOD_RES (10)..(10): Citrulline
QKSALAFLNXGQPSSS

SEQ ID NO: 7269 - protein, 16 aa, Artificial Sequence
  source: /note="Description of Artificial Sequence: Synthetic peptide"
  MOD_RES (6)..(6): Citrulline
LAFLNXGQPSSSNAGN

SEQ ID NO: 7270 - protein, 16 aa, Artificial Sequence
  source: /note="Description of Artificial Sequence: Synthetic peptide"
  MOD_RES (10)..(10): Citrulline
AIVAKTFKGXGIPNIE

SEQ ID NO: 7271 - protein, 16 aa, Artificial Sequence
  source: /note="Description of Artificial Sequence: Synthetic peptide"
  MOD_RES (6)..(6): Citrulline
KTFKGXGIPNIEDAEN

SEQ ID NO: 7272 - protein, 16 aa, Artificial Sequence
  source: /note="Description of Artificial Sequence: Synthetic peptide"
  MOD_RES (9)..(9): Citrulline
LVQPGIVQXGLVQPGA

SEQ ID NO: 7273 - protein, 16 aa, Artificial Sequence
  source: /note="Description of Artificial Sequence: Synthetic peptide"
  MOD_RES (5)..(5): Citrulline
  MOD_RES (15)..(15): Citrulline
GIVQXGLVQPGAVQXG

SEQ ID NO: 7274 - protein, 16 aa, Artificial Sequence
  source: /note="Description of Artificial Sequence: Synthetic peptide"
  MOD_RES (1)..(1): Citrulline
  MOD_RES (11)..(11): Citrulline
XGLVQPGAVQXGLVQP

SEQ ID NO: 7275 - protein, 16 aa, Artificial Sequence
  source: /note="Description of Artificial Sequence: Synthetic peptide"
  MOD_RES (7)..(7): Citrulline
QPGAVQXGLVQPGAVQ

SEQ ID NO: 7276 - protein, 16 aa, Artificial Sequence
  source: /note="Description of Artificial Sequence: Synthetic peptide"
  MOD_RES (3)..(3): Citrulline
  MOD_RES (13)..(13): Citrulline
VQXGLVQPGAVQXGLV

SEQ ID NO: 7277 - protein, 16 aa, Artificial Sequence
  source: /note="Description of Artificial Sequence: Synthetic peptide"
  MOD_RES (9)..(9): Citrulline
LVQPGAVQXGLVQPGV

SEQ ID NO: 7278 - protein, 16 aa, Artificial Sequence
  source: /note="Description of Artificial Sequence: Synthetic peptide"
  MOD_RES (5)..(5): Citrulline
  MOD_RES (15)..(15): Citrulline
GAVQXGLVQPGVDQXG

SEQ ID NO: 7279 - protein, 16 aa, Artificial Sequence
  source: /note="Description of Artificial Sequence: Synthetic peptide"
  MOD_RES (3)..(3): Citrulline
  MOD_RES (13)..(13): Citrulline
DQXGLVQPGAVQXGLV

SEQ ID NO: 7280 - protein, 16 aa, Artificial Sequence
  source: /note="Description of Artificial Sequence: Synthetic peptide"
  MOD_RES (9)..(9): Citrulline
LVQPGAVQXGLVQPGA

SEQ ID NO: 7281 - protein, 16 aa, Artificial Sequence
  source: /note="Description of Artificial Sequence: Synthetic peptide"
  MOD_RES (5)..(5): Citrulline
GAVQXGLVQPGAVQHG

SEQ ID NO: 7282 - protein, 16 aa, Artificial Sequence
  source: /note="Description of Artificial Sequence: Synthetic peptide"
  MOD_RES (13)..(13): Citrulline
YLHDLSQSGTYPXGLV

SEQ ID NO: 7283 - protein, 16 aa, Artificial Sequence
  source: /note="Description of Artificial Sequence: Synthetic peptide"
  MOD_RES (9)..(9): Citrulline
LSQSGTYPXGLVQPGM

SEQ ID NO: 7284 - protein, 16 aa, Artificial Sequence
  source: /note="Description of Artificial Sequence: Synthetic peptide"
  MOD_RES (5)..(5): Citrulline
GTYPXGLVQPGMDQYG

SEQ ID NO: 7285 - protein, 16 aa, Artificial Sequence
  source: /note="Description of Artificial Sequence: Synthetic peptide"
  MOD_RES (11)..(11): Citrulline
PGLIAPGTKLXGSSTF

SEQ ID NO: 7286 - protein, 16 aa, Artificial Sequence
  source: /note="Description of Artificial Sequence: Synthetic peptide"
  MOD_RES (7)..(7): Citrulline
APGTKLXGSSTFQADS

SEQ ID NO: 7287 - protein, 16 aa, Artificial Sequence
  source: /note="Description of Artificial Sequence: Synthetic peptide"
  MOD_RES (4)..(4): Citrulline
  MOD_RES (12)..(12): Citrulline
DAQXNAPGWSQXGSLS

SEQ ID NO: 7288 - protein, 16 aa, Artificial Sequence
  source: /note="Description of Artificial Sequence: Synthetic peptide"
  MOD_RES (8)..(8): Citrulline
NAPGWSQXGSLSQQEN

SEQ ID NO: 7289 - protein, 16 aa, Artificial Sequence
  source: /note="Description of Artificial Sequence: Synthetic peptide"
  MOD_RES (4)..(4): Citrulline
WSQXGSLSQQENLLMP

SEQ ID NO: 7290 - protein, 16 aa, Artificial Sequence
  source: /note="Description of Artificial Sequence: Synthetic peptide"
  MOD_RES (3)..(3): Citrulline
  MOD_RES (14)..(14): Citrulline
PPXGLLGDAPNDPXGG

SEQ ID NO: 7291 - protein, 16 aa, Artificial Sequence
  source: /note="Description of Artificial Sequence: Synthetic peptide"
  MOD_RES (4)..(4): Citrulline
  MOD_RES (7)..(7): Citrulline
TEWXFSXGVQEQTKAF

SEQ ID NO: 7292 - protein, 16 aa, Artificial Sequence
  source: /note="Description of Artificial Sequence: Synthetic peptide"
  MOD_RES (3)..(3): Citrulline
FSXGVQEQTKAFLDGF

SEQ ID NO: 7293 - protein, 16 aa, Artificial Sequence
  source: /note="Description of Artificial Sequence: Synthetic peptide"
  MOD_RES (6)..(6): Citrulline
FNMSIXGDTGHKAYEY

SEQ ID NO: 7294 - protein, 16 aa, Artificial Sequence
  source: /note="Description of Artificial Sequence: Synthetic peptide"
  MOD_RES (2)..(2): Citrulline
IXGDTGHKAYEYQEYG

SEQ ID NO: 7295 - protein, 16 aa, Artificial Sequence
  source: /note="Description of Artificial Sequence: Synthetic peptide"
  MOD_RES (8)..(8): Citrulline
TYINAISXGDLPCMEN

SEQ ID NO: 7296 - protein, 16 aa, Artificial Sequence
  source: /note="Description of Artificial Sequence: Synthetic peptide"
  MOD_RES (4)..(4): Citrulline
AISXGDLPCMENAVLA

SEQ ID NO: 7297 - protein, 16 aa, Artificial Sequence
  source: /note="Description of Artificial Sequence: Synthetic peptide"
  MOD_RES (10)..(10): Citrulline
NFPAKGKPKXGDTYEL

SEQ ID NO: 7298 - protein, 16 aa, Artificial Sequence
  source: /note="Description of Artificial Sequence: Synthetic peptide"
  MOD_RES (6)..(6): Citrulline
  MOD_RES (15)..(15): Citrulline
KGKPKXGDTYELQVXG

SEQ ID NO: 7299 - protein, 16 aa, Artificial Sequence
  source: /note="Description of Artificial Sequence: Synthetic peptide"
  MOD_RES (2)..(2): Citrulline
  MOD_RES (11)..(11): Citrulline
KXGDTYELQVXGFSAE

SEQ ID NO: 7300 - protein, 16 aa, Artificial Sequence
  source: /note="Description of Artificial Sequence: Synthetic peptide"
  MOD_RES (13)..(13): Citrulline
LYSGSTGHQIGLXGSL

SEQ ID NO: 7301 - protein, 16 aa, Artificial Sequence
  source: /note="Description of Artificial Sequence: Synthetic peptide"
  MOD_RES (9)..(9): Citrulline
STGHQIGLXGSLGVDG

SEQ ID NO: 7302 - protein, 16 aa, Artificial Sequence
  source: /note="Description of Artificial Sequence: Synthetic peptide"
  MOD_RES (10)..(11): Citrulline
QSETPGAPVXXGTTYV

SEQ ID NO: 7303 - protein, 16 aa, Artificial Sequence
  source: /note="Description of Artificial Sequence: Synthetic peptide"
  MOD_RES (6)..(7): Citrulline
PGAPVXXGTTYVEQVQ

SEQ ID NO: 7304 - protein, 16 aa, Artificial Sequence
  source: /note="Description of Artificial Sequence: Synthetic peptide"
  MOD_RES (2)..(3): Citrulline
VXXGTTYVEQVQEELG

SEQ ID NO: 7305 - protein, 16 aa, Artificial Sequence
  source: /note="Description of Artificial Sequence: Synthetic peptide"
  MOD_RES (9)..(9): Citrulline
  MOD_RES (12)..(12): Citrulline
VLLTHLDLXGNXLKVM

SEQ ID NO: 7306 - protein, 16 aa, Artificial Sequence
  source: /note="Description of Artificial Sequence: Synthetic peptide"
  MOD_RES (5)..(5): Citrulline
  MOD_RES (8)..(8): Citrulline
HLDLXGNXLKVMPFAG

SEQ ID NO: 7307 - protein, 16 aa, Artificial Sequence
  source: /note="Description of Artificial Sequence: Synthetic peptide"
  MOD_RES (8)..(8): Citrulline
LESGAGAXGSFNKFQP

SEQ ID NO: 7308 - protein, 16 aa, Artificial Sequence
  source: /note="Description of Artificial Sequence: Synthetic peptide"
  MOD_RES (4)..(4): Citrulline
AGAXGSFNKFQPQPST

SEQ ID NO: 7309 - protein, 16 aa, Artificial Sequence
  source: /note="Description of Artificial Sequence: Synthetic peptide"
  MOD_RES (14)..(14): Citrulline
QPQPPAQPHLYLQXGA

SEQ ID NO: 7310 - protein, 16 aa, Artificial Sequence
  source: /note="Description of Artificial Sequence: Synthetic peptide"
  MOD_RES (10)..(10): Citrulline
PAQPHLYLQXGACKTP

SEQ ID NO: 7311 - protein, 16 aa, Artificial Sequence
  source: /note="Description of Artificial Sequence: Synthetic peptide"
  MOD_RES (6)..(6): Citrulline
HLYLQXGACKTPPDGS

SEQ ID NO: 7312 - protein, 16 aa, Artificial Sequence
  source: /note="Description of Artificial Sequence: Synthetic peptide"
  MOD_RES (2)..(2): Citrulline
QXGACKTPPDGSLKLQ

SEQ ID NO: 7313 - protein, 16 aa, Artificial Sequence
  source: /note="Description of Artificial Sequence: Synthetic peptide"
  MOD_RES (3)..(3): Citrulline
  MOD_RES (10)..(10): Citrulline
AAXHHENSSXGAVVGV

SEQ ID NO: 7314 - protein, 16 aa, Artificial Sequence
  source: /note="Description of Artificial Sequence: Synthetic peptide"
  MOD_RES (6)..(6): Citrulline
HENSSXGAVVGVGDES

SEQ ID NO: 7315 - protein, 16 aa, Artificial Sequence
  source: /note="Description of Artificial Sequence: Synthetic peptide"
  MOD_RES (2)..(2): Citrulline
  MOD_RES (11)..(11): Citrulline
SXTSINGLLGXGSMFV

SEQ ID NO: 7316 - protein, 16 aa, Artificial Sequence
  source: /note="Description of Artificial Sequence: Synthetic peptide"
  MOD_RES (7)..(7): Citrulline
INGLLGXGSMFVFSPD

SEQ ID NO: 7317 - protein, 16 aa, Artificial Sequence
  source: /note="Description of Artificial Sequence: Synthetic peptide"
  MOD_RES (5)..(5): Citrulline
  MOD_RES (12)..(12): Citrulline
SHQEXLQNHPKXGLFM

SEQ ID NO: 7318 - protein, 16 aa, Artificial Sequence
  source: /note="Description of Artificial Sequence: Synthetic peptide"
  MOD_RES (1)..(1): Citrulline
  MOD_RES (8)..(8): Citrulline
XLQNHPKXGLFMNSEF

SEQ ID NO: 7319 - protein, 16 aa, Artificial Sequence
  source: /note="Description of Artificial Sequence: Synthetic peptide"
  MOD_RES (2)..(2): Citrulline
  MOD_RES (10)..(10): Citrulline
QXYAQAFHTXGSEDLD

SEQ ID NO: 7320 - protein, 16 aa, Artificial Sequence
  source: /note="Description of Artificial Sequence: Synthetic peptide"
  MOD_RES (6)..(6): Citrulline
QAFHTXGSEDLDKDSV

SEQ ID NO: 7321 - protein, 16 aa, Artificial Sequence
  source: /note="Description of Artificial Sequence: Synthetic peptide"
  MOD_RES (8)..(8): Citrulline
  MOD_RES (10)..(10): Citrulline
AANLSANXKXGAIVSE

SEQ ID NO: 7322 - protein, 16 aa, Artificial Sequence
  source: /note="Description of Artificial Sequence: Synthetic peptide"
  MOD_RES (4)..(4): Citrulline
  MOD_RES (6)..(6): Citrulline
SANXKXGAIVSEPAIQ

SEQ ID NO: 7323 - protein, 16 aa, Artificial Sequence
  source: /note="Description of Artificial Sequence: Synthetic peptide"
  MOD_RES (7)..(7): Citrulline
  MOD_RES (12)..(12): Citrulline
KVPEAKXLYGKXGDPF

SEQ ID NO: 7324 - protein, 16 aa, Artificial Sequence
  source: /note="Description of Artificial Sequence: Synthetic peptide"
  MOD_RES (3)..(3): Citrulline
  MOD_RES (8)..(8): Citrulline
AKXLYGKXGDPFYEAQ

SEQ ID NO: 7325 - protein, 16 aa, Artificial Sequence
  source: /note="Description of Artificial Sequence: Synthetic peptide"
  MOD_RES (4)..(4): Citrulline
YGKXGDPFYEAQENHN

SEQ ID NO: 7326 - protein, 16 aa, Artificial Sequence
  source: /note="Description of Artificial Sequence: Synthetic peptide"
  MOD_RES (12)..(12): Citrulline
SDGETYIEKYTXGVLQ

SEQ ID NO: 7327 - protein, 16 aa, Artificial Sequence
  source: /note="Description of Artificial Sequence: Synthetic peptide"
  MOD_RES (8)..(8): Citrulline
TYIEKYTXGVLQVENI

SEQ ID NO: 7328 - protein, 16 aa, Artificial Sequence
  source: /note="Description of Artificial Sequence: Synthetic peptide"
  MOD_RES (11)..(12): Citrulline
SQSPNSVHGSXXGSIS

SEQ ID NO: 7329 - protein, 16 aa, Artificial Sequence
  source: /note="Description of Artificial Sequence: Synthetic peptide"
  MOD_RES (7)..(8): Citrulline
NSVHGSXXGSISSMSS

SEQ ID NO: 7330 - protein, 16 aa, Artificial Sequence
  source: /note="Description of Artificial Sequence: Synthetic peptide"
  MOD_RES (3)..(4): Citrulline
GSXXGSISSMSSVSSV

SEQ ID NO: 7331 - protein, 16 aa, Artificial Sequence
  source: /note="Description of Artificial Sequence: Synthetic peptide"
  MOD_RES (5)..(5): Citrulline
  MOD_RES (12)..(12): Citrulline
QQVAXGEPGSAXGQLQ

SEQ ID NO: 7332 - protein, 16 aa, Artificial Sequence
  source: /note="Description of Artificial Sequence: Synthetic peptide"
  MOD_RES (1)..(1): Citrulline
  MOD_RES (8)..(8): Citrulline
XGEPGSAXGQLQVSPE

SEQ ID NO: 7333 - protein, 16 aa, Artificial Sequence
  source: /note="Description of Artificial Sequence: Synthetic peptide"
  MOD_RES (4)..(4): Citrulline
GSAXGQLQVSPEMSIT

SEQ ID NO: 7334 - protein, 16 aa, Artificial Sequence
  source: /note="Description of Artificial Sequence: Synthetic peptide"
  MOD_RES (9)..(9): Citrulline
  MOD_RES (13)..(13): Citrulline
QHWGPVVHXGMPXYVP

SEQ ID NO: 7335 - protein, 16 aa, Artificial Sequence
  source: /note="Description of Artificial Sequence: Synthetic peptide"
  MOD_RES (6)..(6): Citrulline
  MOD_RES (11)..(11): Citrulline
ACFLVXGLLLXGAVDG

SEQ ID NO: 7336 - protein, 16 aa, Artificial Sequence
  source: /note="Description of Artificial Sequence: Synthetic peptide"
  MOD_RES (2)..(2): Citrulline
  MOD_RES (7)..(7): Citrulline
VXGLLLXGAVDGILHM

SEQ ID NO: 7337 - protein, 16 aa, Artificial Sequence
  source: /note="Description of Artificial Sequence: Synthetic peptide"
  MOD_RES (6)..(6): Citrulline
  MOD_RES (8)..(8): Citrulline
GEDYSXSXGSPSSYNS

SEQ ID NO: 7338 - protein, 16 aa, Artificial Sequence
  source: /note="Description of Artificial Sequence: Synthetic peptide"
  MOD_RES (2)..(2): Citrulline
  MOD_RES (4)..(4): Citrulline
SXSXGSPSSYNSSSSS

SEQ ID NO: 7339 - protein, 16 aa, Artificial Sequence
  source: /note="Description of Artificial Sequence: Synthetic peptide"
  MOD_RES (10)..(10): Citrulline
  MOD_RES (13)..(13): Citrulline
LHYNYTGKLXGAXYQP

SEQ ID NO: 7340 - protein, 16 aa, Artificial Sequence
  source: /note="Description of Artificial Sequence: Synthetic peptide"
  MOD_RES (6)..(6): Citrulline
  MOD_RES (9)..(9): Citrulline
YTGKLXGAXYQPGAGL

SEQ ID NO: 7341 - protein, 16 aa, Artificial Sequence
  source: /note="Description of Artificial Sequence: Synthetic peptide"
  MOD_RES (8)..(8): Citrulline
TVTWHKMXGAQMIVAM

SEQ ID NO: 7342 - protein, 16 aa, Artificial Sequence
  source: /note="Description of Artificial Sequence: Synthetic peptide"
  MOD_RES (11)..(11): Citrulline
QLLTVPEHSPXGTLVG

SEQ ID NO: 7343 - protein, 16 aa, Artificial Sequence
  source: /note="Description of Artificial Sequence: Synthetic peptide"
  MOD_RES (7)..(7): Citrulline
VPEHSPXGTLVGNVTG

SEQ ID NO: 7344 - protein, 16 aa, Artificial Sequence
  source: /note="Description of Artificial Sequence: Synthetic peptide"
  MOD_RES (3)..(3): Citrulline
SPXGTLVGNVTGAVDA

SEQ ID NO: 7345 - protein, 16 aa, Artificial Sequence
  source: /note="Description of Artificial Sequence: Synthetic peptide"
  MOD_RES (8)..(8): Citrulline
ITVCDSGXGSLVFGDM

SEQ ID NO: 7346 - protein, 16 aa, Artificial Sequence
  source: /note="Description of Artificial Sequence: Synthetic peptide"
  MOD_RES (4)..(4): Citrulline
DSGXGSLVFGDMEGQI

SEQ ID NO: 7347 - protein, 16 aa, Artificial Sequence
  source: /note="Description of Artificial Sequence: Synthetic peptide"
  MOD_RES (6)..(6): Citrulline
  MOD_RES (11)..(11): Citrulline
CSPPVXDILSXGGFLG

SEQ ID NO: 7348 - protein, 16 aa, Artificial Sequence
  source: /note="Description of Artificial Sequence: Synthetic peptide"
  MOD_RES (2)..(2): Citrulline
  MOD_RES (7)..(7): Citrulline
VXDILSXGGFLGEGPG

SEQ ID NO: 7349 - protein, 16 aa, Artificial Sequence
  source: /note="Description of Artificial Sequence: Synthetic peptide"
  MOD_RES (3)..(3): Citrulline
LSXGGFLGEGPGDTAE

SEQ ID NO: 7350 - protein, 16 aa, Artificial Sequence
  source: /note="Description of Artificial Sequence: Synthetic peptide"
  MOD_RES (12)..(12): Citrulline
SDSTAQEGYESXGGML

SEQ ID NO: 7351 - protein, 16 aa, Artificial Sequence
  source: /note="Description of Artificial Sequence: Synthetic peptide"
  MOD_RES (8)..(8): Citrulline
AQEGYESXGGMLDWKH

SEQ ID NO: 7352 - protein, 16 aa, Artificial Sequence
  source: /note="Description of Artificial Sequence: Synthetic peptide"
  MOD_RES (4)..(4): Citrulline
YESXGGMLDWKHLLDS

SEQ ID NO: 7353 - protein, 16 aa, Artificial Sequence
  source: /note="Description of Artificial Sequence: Synthetic peptide"
  MOD_RES (8)..(8): Citrulline
  MOD_RES (11)..(11): Citrulline
LVLEANGXKVXGGLPL

SEQ ID NO: 7354 - protein, 16 aa, Artificial Sequence
  source: /note="Description of Artificial Sequence: Synthetic peptide"
  MOD_RES (4)..(4): Citrulline
  MOD_RES (7)..(7): Citrulline
ANGXKVXGGLPLVTCA

SEQ ID NO: 7355 - protein, 16 aa, Artificial Sequence
  source: /note="Description of Artificial Sequence: Synthetic peptide"
  MOD_RES (12)..(12): Citrulline
DEYSEYLKHNVXGVVS

SEQ ID NO: 7356 - protein, 16 aa, Artificial Sequence
  source: /note="Description of Artificial Sequence: Synthetic peptide"
  MOD_RES (8)..(8): Citrulline
EYLKHNVXGVVSMANN

SEQ ID NO: 7357 - protein, 16 aa, Artificial Sequence
  source: /note="Description of Artificial Sequence: Synthetic peptide"
  MOD_RES (4)..(4): Citrulline
HNVXGVVSMANNGPNT

SEQ ID NO: 7358 - protein, 16 aa, Artificial Sequence
  source: /note="Description of Artificial Sequence: Synthetic peptide"
  MOD_RES (7)..(7): Citrulline
  MOD_RES (14)..(14): Citrulline
IYTASSXGGPPSAXSK

SEQ ID NO: 7359 - protein, 16 aa, Artificial Sequence
  source: /note="Description of Artificial Sequence: Synthetic peptide"
  MOD_RES (9)..(9): Citrulline
  MOD_RES (11)..(11): Citrulline
ADGGPLLYXPXGPLTD

SEQ ID NO: 7360 - protein, 16 aa, Artificial Sequence
  source: /note="Description of Artificial Sequence: Synthetic peptide"
  MOD_RES (5)..(5): Citrulline
  MOD_RES (7)..(7): Citrulline
PLLYXPXGPLTDPGAS

SEQ ID NO: 7361 - protein, 16 aa, Artificial Sequence
  source: /note="Description of Artificial Sequence: Synthetic peptide"
  MOD_RES (10)..(10): Citrulline
GPAGGHGGNXGSGGGG

SEQ ID NO: 7362 - protein, 16 aa, Artificial Sequence
  source: /note="Description of Artificial Sequence: Synthetic peptide"
  MOD_RES (11)..(11): Citrulline
TQFILDNYIEXGKGSA

SEQ ID NO: 7363 - protein, 16 aa, Artificial Sequence
  source: /note="Description of Artificial Sequence: Synthetic peptide"
  MOD_RES (7)..(7): Citrulline
  MOD_RES (14)..(14): Citrulline
LDNYIEXGKGSACXIV

SEQ ID NO: 7364 - protein, 16 aa, Artificial Sequence
  source: /note="Description of Artificial Sequence: Synthetic peptide"
  MOD_RES (7)..(7): Citrulline
  MOD_RES (12)..(12): Citrulline
PEQKEHXSQFKXGFMQ

SEQ ID NO: 7365 - protein, 16 aa, Artificial Sequence
  source: /note="Description of Artificial Sequence: Synthetic peptide"
  MOD_RES (3)..(3): Citrulline
  MOD_RES (8)..(8): Citrulline
EHXSQFKXGFMQGHVN

SEQ ID NO: 7366 - protein, 16 aa, Artificial Sequence
  source: /note="Description of Artificial Sequence: Synthetic peptide"
  MOD_RES (10)..(10): Citrulline
  MOD_RES (14)..(14): Citrulline
LMITTKGSPXGELXGQ

SEQ ID NO: 7367 - protein, 16 aa, Artificial Sequence
  source: /note="Description of Artificial Sequence: Synthetic peptide"
  MOD_RES (6)..(6): Citrulline
  MOD_RES (10)..(10): Citrulline
TKGSPXGELXGQVHIA

SEQ ID NO: 7368 - protein, 16 aa, Artificial Sequence
  source: /note="Description of Artificial Sequence: Synthetic peptide"
  MOD_RES (2)..(2): Citrulline
  MOD_RES (6)..(6): Citrulline
PXGELXGQVHIANQCE

SEQ ID NO: 7369 - protein, 16 aa, Artificial Sequence
  source: /note="Description of Artificial Sequence: Synthetic peptide"
  MOD_RES (2)..(2): Citrulline
  MOD_RES (13)..(13): Citrulline
YXGAEKEWGDGIXGLS

SEQ ID NO: 7370 - protein, 16 aa, Artificial Sequence
  source: /note="Description of Artificial Sequence: Synthetic peptide"
  MOD_RES (12)..(12): Citrulline
  MOD_RES (15)..(15): Citrulline
DEDGEWWIAKQXGKXA

SEQ ID NO: 7371 - protein, 16 aa, Artificial Sequence
  source: /note="Description of Artificial Sequence: Synthetic peptide"
  MOD_RES (8)..(8): Citrulline
  MOD_RES (11)..(11): Citrulline
EWWIAKQXGKXAITDN

SEQ ID NO: 7372 - protein, 16 aa, Artificial Sequence
  source: /note="Description of Artificial Sequence: Synthetic peptide"
  MOD_RES (11)..(11): Citrulline
  MOD_RES (16)..(16): Citrulline
HIISGTCASWXGKSLX

SEQ ID NO: 7373 - protein, 16 aa, Artificial Sequence
  source: /note="Description of Artificial Sequence: Synthetic peptide"
  MOD_RES (10)..(10): Citrulline
  MOD_RES (14)..(14): Citrulline
AGVPFHAKGXGLLXKM

SEQ ID NO: 7374 - protein, 16 aa, Artificial Sequence
  source: /note="Description of Artificial Sequence: Synthetic peptide"
  MOD_RES (6)..(6): Citrulline
  MOD_RES (10)..(10): Citrulline
FHAKGXGLLXKMDTTT

SEQ ID NO: 7375 - protein, 16 aa, Artificial Sequence
  source: /note="Description of Artificial Sequence: Synthetic peptide"
  MOD_RES (13)..(13): Citrulline
MEAYVPGFAHIPXGTI

SEQ ID NO: 7376 - protein, 16 aa, Artificial Sequence
  source: /note="Description of Artificial Sequence: Synthetic peptide"
  MOD_RES (9)..(9): Citrulline
VPGFAHIPXGTIGDMM

SEQ ID NO: 7377 - protein, 16 aa, Artificial Sequence
  source: /note="Description of Artificial Sequence: Synthetic peptide"
  MOD_RES (5)..(5): Citrulline
AHIPXGTIGDMMQKLS

SEQ ID NO: 7378 - protein, 16 aa, Artificial Sequence
  source: /note="Description of Artificial Sequence: Synthetic peptide"
  MOD_RES (8)..(8): Citrulline
QWVLAKAXGDLEEAVQ

SEQ ID NO: 7379 - protein, 16 aa, Artificial Sequence
  source: /note="Description of Artificial Sequence: Synthetic peptide"
  MOD_RES (3)..(3): Citrulline
GGXGSLHPAAGPGTAF

SEQ ID NO: 7380 - protein, 16 aa, Artificial Sequence
  source: /note="Description of Artificial Sequence: Synthetic peptide"
  MOD_RES (9)..(9): Citrulline
LKFDIEIGXGSFKTVY

SEQ ID NO: 7381 - protein, 16 aa, Artificial Sequence
  source: /note="Description of Artificial Sequence: Synthetic peptide"
  MOD_RES (5)..(5): Citrulline
IEIGXGSFKTVYKGLD

SEQ ID NO: 7382 - protein, 16 aa, Artificial Sequence
  source: /note="Description of Artificial Sequence: Synthetic peptide"
  MOD_RES (9)..(9): Citrulline
KILKDPYLXGELLKHT

SEQ ID NO: 7383 - protein, 16 aa, Artificial Sequence
  source: /note="Description of Artificial Sequence: Synthetic peptide"
  MOD_RES (5)..(5): Citrulline
DPYLXGELLKHTKLDI

SEQ ID NO: 7384 - protein, 16 aa, Artificial Sequence
  source: /note="Description of Artificial Sequence: Synthetic peptide"
  MOD_RES (1)..(1): Citrulline
XGELLKHTKLDIVDSL

SEQ ID NO: 7385 - protein, 16 aa, Artificial Sequence
  source: /note="Description of Artificial Sequence: Synthetic peptide"
  MOD_RES (10)..(10): Citrulline
  MOD_RES (14)..(14): Citrulline
WPAFYQGAYXGATXVE

SEQ ID NO: 7386 - protein, 16 aa, Artificial Sequence
  source: /note="Description of Artificial Sequence: Synthetic peptide"
  MOD_RES (6)..(6): Citrulline
  MOD_RES (10)..(10): Citrulline
YQGAYXGATXVETHFQ

SEQ ID NO: 7387 - protein, 16 aa, Artificial Sequence
  source: /note="Description of Artificial Sequence: Synthetic peptide"
  MOD_RES (6)..(6): Citrulline
NILFPXGTQSTEGSPV

SEQ ID NO: 7388 - protein, 16 aa, Artificial Sequence
  source: /note="Description of Artificial Sequence: Synthetic peptide"
  MOD_RES (12)..(12): Citrulline
NGQLKWYEDYKXGNFP

SEQ ID NO: 7389 - protein, 16 aa, Artificial Sequence
  source: /note="Description of Artificial Sequence: Synthetic peptide"
  MOD_RES (8)..(8): Citrulline
KWYEDYKXGNFPPGLL

SEQ ID NO: 7390 - protein, 16 aa, Artificial Sequence
  source: /note="Description of Artificial Sequence: Synthetic peptide"
  MOD_RES (8)..(8): Citrulline
AEITNLLXGDLLSENP

SEQ ID NO: 7391 - protein, 16 aa, Artificial Sequence
  source: /note="Description of Artificial Sequence: Synthetic peptide"
  MOD_RES (4)..(4): Citrulline
NLLXGDLLSENPQQAA

SEQ ID NO: 7392 - protein, 16 aa, Artificial Sequence
  source: /note="Description of Artificial Sequence: Synthetic peptide"
  MOD_RES (6)..(6): Citrulline
LPVHIXGWLHKQDSSG

SEQ ID NO: 7393 - protein, 16 aa, Artificial Sequence
  source: /note="Description of Artificial Sequence: Synthetic peptide"
  MOD_RES (6)..(6): Citrulline
  MOD_RES (9)..(9): Citrulline
PKKKVXMVXGELVDES

SEQ ID NO: 7394 - protein, 16 aa, Artificial Sequence
  source: /note="Description of Artificial Sequence: Synthetic peptide"
  MOD_RES (2)..(2): Citrulline
  MOD_RES (5)..(5): Citrulline
VXMVXGELVDESGGSP

SEQ ID NO: 7395 - protein, 16 aa, Artificial Sequence
  source: /note="Description of Artificial Sequence: Synthetic peptide"
  MOD_RES (6)..(6): Citrulline
  MOD_RES (8)..(8): Citrulline
AAGKGXGXLDSGTLPP

SEQ ID NO: 7396 - protein, 16 aa, Artificial Sequence
  source: /note="Description of Artificial Sequence: Synthetic peptide"
  MOD_RES (2)..(2): Citrulline
  MOD_RES (4)..(4): Citrulline
GXGXLDSGTLPPAVAA

SEQ ID NO: 7397 - protein, 16 aa, Artificial Sequence
  source: /note="Description of Artificial Sequence: Synthetic peptide"
  MOD_RES (2)..(2): Citrulline
  MOD_RES (10)..(10): Citrulline
SXNTSSVSPXGYVPSS

SEQ ID NO: 7398 - protein, 16 aa, Artificial Sequence
  source: /note="Description of Artificial Sequence: Synthetic peptide"
  MOD_RES (13)..(13): Citrulline
  MOD_RES (15)..(15): Citrulline
ICHPDTFSYPIEXGXI

SEQ ID NO: 7399 - protein, 16 aa, Artificial Sequence
  source: /note="Description of Artificial Sequence: Synthetic peptide"
  MOD_RES (9)..(9): Citrulline
  MOD_RES (11)..(11): Citrulline
DTFSYPIEXGXILNWE

SEQ ID NO: 7400 - protein, 16 aa, Artificial Sequence
  source: /note="Description of Artificial Sequence: Synthetic peptide"
  MOD_RES (7)..(7): Citrulline
GDIHYQXGSGAPLPPS

SEQ ID NO: 7401 - protein, 16 aa, Artificial Sequence
  source: /note="Description of Artificial Sequence: Synthetic peptide"
  MOD_RES (3)..(3): Citrulline
YQXGSGAPLPPSGSKD

SEQ ID NO: 7402 - protein, 16 aa, Artificial Sequence
  source: /note="Description of Artificial Sequence: Synthetic peptide"
  MOD_RES (12)..(12): Citrulline
NICGICGKSFGXGSTL

SEQ ID NO: 7403 - protein, 16 aa, Artificial Sequence
  source: /note="Description of Artificial Sequence: Synthetic peptide"
  MOD_RES (8)..(8): Citrulline
ICGKSFGXGSTLIQHQ

SEQ ID NO: 7404 - protein, 16 aa, Artificial Sequence
  source: /note="Description of Artificial Sequence: Synthetic peptide"
  MOD_RES (13)..(13): Citrulline
QLPSLEFLSSTSXGTQ

SEQ ID NO: 7405 - protein, 16 aa, Artificial Sequence
  source: /note="Description of Artificial Sequence: Synthetic peptide"
  MOD_RES (9)..(9): Citrulline
LEFLSSTSXGTQPSLA

SEQ ID NO: 7406 - protein, 16 aa, Artificial Sequence
  source: /note="Description of Artificial Sequence: Synthetic peptide"
  MOD_RES (10)..(10): Citrulline
LLPGAGQYHXGLVTSP

SEQ ID NO: 7407 - protein, 16 aa, Artificial Sequence
  source: /note="Description of Artificial Sequence: Synthetic peptide"
  MOD_RES (6)..(6): Citrulline
AGQYHXGLVTSPLPAP

SEQ ID NO: 7408 - protein, 16 aa, Artificial Sequence
  source: /note="Description of Artificial Sequence: Synthetic peptide"
  MOD_RES (4)..(4): Citrulline
  MOD_RES (10)..(10): Citrulline
PAGXLGFSVXGGSEHG

SEQ ID NO: 7409 - protein, 16 aa, Artificial Sequence
  source: /note="Description of Artificial Sequence: Synthetic peptide"
  MOD_RES (6)..(6): Citrulline
PAMSSXGLFKNLGIEA

SEQ ID NO: 7410 - protein, 16 aa, Artificial Sequence
  source: /note="Description of Artificial Sequence: Synthetic peptide"
  MOD_RES (2)..(2): Citrulline
SXGLFKNLGIEAVPWT

SEQ ID NO: 7411 - protein, 16 aa, Artificial Sequence
  source: /note="Description of Artificial Sequence: Synthetic peptide"
  MOD_RES (10)..(10): Citrulline
  MOD_RES (14)..(14): Citrulline
LKVVGMFPSXGEKXAL

SEQ ID NO: 7412 - protein, 16 aa, Artificial Sequence
  source: /note="Description of Artificial Sequence: Synthetic peptide"
  MOD_RES (6)..(6): Citrulline
  MOD_RES (10)..(10): Citrulline
GMFPSXGEKXALWKLA

SEQ ID NO: 7413 - protein, 16 aa, Artificial Sequence
  source: /note="Description of Artificial Sequence: Synthetic peptide"
  MOD_RES (6)..(6): Citrulline
  MOD_RES (9)..(9): Citrulline
EPPKTXGSXGHLHTHP

SEQ ID NO: 7414 - protein, 16 aa, Artificial Sequence
  source: /note="Description of Artificial Sequence: Synthetic peptide"
  MOD_RES (2)..(2): Citrulline
  MOD_RES (5)..(5): Citrulline
TXGSXGHLHTHPPGPG

SEQ ID NO: 7415 - protein, 16 aa, Artificial Sequence
  source: /note="Description of Artificial Sequence: Synthetic peptide"
  MOD_RES (13)..(13): Citrulline
PGPGPPLQGLAPXGLK

SEQ ID NO: 7416 - protein, 16 aa, Artificial Sequence
  source: /note="Description of Artificial Sequence: Synthetic peptide"
  MOD_RES (9)..(9): Citrulline
PPLQGLAPXGLKTSAP

SEQ ID NO: 7417 - protein, 16 aa, Artificial Sequence
  source: /note="Description of Artificial Sequence: Synthetic peptide"
  MOD_RES (11)..(11): Citrulline
VMLVKNLSVSXGLVNG

SEQ ID NO: 7418 - protein, 16 aa, Artificial Sequence
  source: /note="Description of Artificial Sequence: Synthetic peptide"
  MOD_RES (7)..(7): Citrulline
  MOD_RES (14)..(14): Citrulline
KNLSVSXGLVNGAXGV

SEQ ID NO: 7419 - protein, 16 aa, Artificial Sequence
  source: /note="Description of Artificial Sequence: Synthetic peptide"
  MOD_RES (2)..(2): Citrulline
  MOD_RES (11)..(11): Citrulline
SXMYGATVIVXGSQNN

SEQ ID NO: 7420 - protein, 16 aa, Artificial Sequence
  source: /note="Description of Artificial Sequence: Synthetic peptide"
  MOD_RES (7)..(7): Citrulline
GATVIVXGSQNNTSAV

SEQ ID NO: 7421 - protein, 16 aa, Artificial Sequence
  source: /note="Description of Artificial Sequence: Synthetic peptide"
  MOD_RES (3)..(3): Citrulline
IVXGSQNNTSAVKEGT

SEQ ID NO: 7422 - protein, 16 aa, Artificial Sequence
  source: /note="Description of Artificial Sequence: Synthetic peptide"
  MOD_RES (14)..(14): Citrulline
PVLKPLEYSQYEVXGA

SEQ ID NO: 7423 - protein, 16 aa, Artificial Sequence
  source: /note="Description of Artificial Sequence: Synthetic peptide"
  MOD_RES (10)..(10): Citrulline
PLEYSQYEVXGAAQVM

SEQ ID NO: 7424 - protein, 16 aa, Artificial Sequence
  source: /note="Description of Artificial Sequence: Synthetic peptide"
  MOD_RES (6)..(6): Citrulline
SQYEVXGAAQVMWFEK

SEQ ID NO: 7425 - protein, 16 aa, Artificial Sequence
  source: /note="Description of Artificial Sequence: Synthetic peptide"
  MOD_RES (2)..(2): Citrulline
VXGAAQVMWFEKLYAG

SEQ ID NO: 7426 - protein, 16 aa, Artificial Sequence
  source: /note="Description of Artificial Sequence: Synthetic peptide"
  MOD_RES (8)..(8): Citrulline
  MOD_RES (15)..(15): Citrulline
CVSCWDLXGSLLSLXE

SEQ ID NO: 7427 - protein, 16 aa, Artificial Sequence
  source: /note="Description of Artificial Sequence: Synthetic peptide"
  MOD_RES (4)..(4): Citrulline
  MOD_RES (11)..(11): Citrulline
WDLXGSLLSLXEGQAL

SEQ ID NO: 7428 - protein, 16 aa, Artificial Sequence
  source: /note="Description of Artificial Sequence: Synthetic peptide"
  MOD_RES (13)..(13): Citrulline
YGAMGSPGAGGGXGFQ

SEQ ID NO: 7429 - protein, 16 aa, Artificial Sequence
  source: /note="Description of Artificial Sequence: Synthetic peptide"
  MOD_RES (9)..(9): Citrulline
GSPGAGGGXGFQMQPQ

SEQ ID NO: 7430 - protein, 16 aa, Artificial Sequence
  source: /note="Description of Artificial Sequence: Synthetic peptide"
  MOD_RES (3)..(3): Citrulline
  MOD_RES (8)..(8): Citrulline
NVXSAWYXGQSPAGDG

SEQ ID NO: 7431 - protein, 16 aa, Artificial Sequence
  source: /note="Description of Artificial Sequence: Synthetic peptide"
  MOD_RES (4)..(4): Citrulline
  MOD_RES (9)..(9): Citrulline
TKGXMVMSXGGELVMV

SEQ ID NO: 7432 - protein, 16 aa, Artificial Sequence
  source: /note="Description of Artificial Sequence: Synthetic peptide"
  MOD_RES (13)..(13): Citrulline
SSKWLTSQTCEIXGSL

SEQ ID NO: 7433 - protein, 16 aa, Artificial Sequence
  source: /note="Description of Artificial Sequence: Synthetic peptide"
  MOD_RES (9)..(9): Citrulline
LTSQTCEIXGSLPILP

SEQ ID NO: 7434 - protein, 16 aa, Artificial Sequence
  source: /note="Description of Artificial Sequence: Synthetic peptide"
  MOD_RES (5)..(5): Citrulline
TCEIXGSLPILPQGCV

SEQ ID NO: 7435 - protein, 16 aa, Artificial Sequence
  source: /note="Description of Artificial Sequence: Synthetic peptide"
  MOD_RES (8)..(8): Citrulline
  MOD_RES (10)..(10): Citrulline
VDSETVVXAXGLPWQS

SEQ ID NO: 7436 - protein, 16 aa, Artificial Sequence
  source: /note="Description of Artificial Sequence: Synthetic peptide"
  MOD_RES (4)..(4): Citrulline
  MOD_RES (11)..(11): Citrulline
KYEXAIECYTXGIAAD

SEQ ID NO: 7437 - protein, 16 aa, Artificial Sequence
  source: /note="Description of Artificial Sequence: Synthetic peptide"
  MOD_RES (11)..(11): Citrulline
  MOD_RES (14)..(14): Citrulline
TGGAANPKGSXGSXGP

SEQ ID NO: 7438 - protein, 16 aa, Artificial Sequence
  source: /note="Description of Artificial Sequence: Synthetic peptide"
  MOD_RES (7)..(7): Citrulline
  MOD_RES (10)..(10): Citrulline
ANPKGSXGSXGPSPLA

SEQ ID NO: 7439 - protein, 16 aa, Artificial Sequence
  source: /note="Description of Artificial Sequence: Synthetic peptide"
  MOD_RES (3)..(3): Citrulline
  MOD_RES (6)..(6): Citrulline
GSXGSXGPSPLAGPSA

SEQ ID NO: 7440 - protein, 16 aa, Artificial Sequence
  source: /note="Description of Artificial Sequence: Synthetic peptide"
  MOD_RES (10)..(10): Citrulline
VAGDTPLAVXGLLKDG

SEQ ID NO: 7441 - protein, 16 aa, Artificial Sequence
  source: /note="Description of Artificial Sequence: Synthetic peptide"
  MOD_RES (6)..(6): Citrulline
  MOD_RES (16)..(16): Citrulline
TPLAVXGLLKDGPAQX

SEQ ID NO: 7442 - protein, 16 aa, Artificial Sequence
  source: /note="Description of Artificial Sequence: Synthetic peptide"
  MOD_RES (3)..(3): Citrulline
  MOD_RES (10)..(10): Citrulline
PSXTTLKKTXGSPEPS

SEQ ID NO: 7443 - protein, 16 aa, Artificial Sequence
  source: /note="Description of Artificial Sequence: Synthetic peptide"
  MOD_RES (6)..(6): Citrulline
TLKKTXGSPEPSPEAA

SEQ ID NO: 7444 - protein, 16 aa, Artificial Sequence
  source: /note="Description of Artificial Sequence: Synthetic peptide"
  MOD_RES (11)..(11): Citrulline
KGFSNSTEHKXGSVAQ

SEQ ID NO: 7445 - protein, 16 aa, Artificial Sequence
  source: /note="Description of Artificial Sequence: Synthetic peptide"
  MOD_RES (7)..(7): Citrulline
NSTEHKXGSVAQKVQE

SEQ ID NO: 7446 - protein, 16 aa, Artificial Sequence
  source: /note="Description of Artificial Sequence: Synthetic peptide"
  MOD_RES (3)..(3): Citrulline
HKXGSVAQKVQEFNNC

SEQ ID NO: 7447 - protein, 16 aa, Artificial Sequence
  source: /note="Description of Artificial Sequence: Synthetic peptide"
  MOD_RES (10)..(10): Citrulline
IPKCESVKSXGALISA

SEQ ID NO: 7448 - protein, 16 aa, Artificial Sequence
  source: /note="Description of Artificial Sequence: Synthetic peptide"
  MOD_RES (6)..(6): Citrulline
  MOD_RES (15)..(15): Citrulline
ESVKSXGALISAFSXD

SEQ ID NO: 7449 - protein, 16 aa, Artificial Sequence
  source: /note="Description of Artificial Sequence: Synthetic peptide"
  MOD_RES (9)..(9): Citrulline
GVQTLVIGXGMSEALK

SEQ ID NO: 7450 - protein, 16 aa, Artificial Sequence
  source: /note="Description of Artificial Sequence: Synthetic peptide"
  MOD_RES (5)..(5): Citrulline
LVIGXGMSEALKVPSS

SEQ ID NO: 7451 - protein, 16 aa, Artificial Sequence
  source: /note="Description of Artificial Sequence: Synthetic peptide"
  MOD_RES (8)..(8): Citrulline
  MOD_RES (11)..(11): Citrulline
VDYNNQKXGKXESQTS

SEQ ID NO: 7452 - protein, 16 aa, Artificial Sequence
  source: /note="Description of Artificial Sequence: Synthetic peptide"
  MOD_RES (4)..(4): Citrulline
  MOD_RES (7)..(7): Citrulline
NQKXGKXESQTSIPDY

SEQ ID NO: 7453 - protein, 16 aa, Artificial Sequence
  source: /note="Description of Artificial Sequence: Synthetic peptide"
  MOD_RES (5)..(5): Citrulline
  MOD_RES (10)..(10): Citrulline
EHDAXVPFTXGLHLLQ

SEQ ID NO: 7454 - protein, 16 aa, Artificial Sequence
  source: /note="Description of Artificial Sequence: Synthetic peptide"
  MOD_RES (1)..(1): Citrulline
  MOD_RES (6)..(6): Citrulline
XVPFTXGLHLLQSGAV

SEQ ID NO: 7455 - protein, 16 aa, Artificial Sequence
  source: /note="Description of Artificial Sequence: Synthetic peptide"
  MOD_RES (1)..(1): Citrulline
  MOD_RES (13)..(13): Citrulline
XQGPGGGAPAASXGSW

SEQ ID NO: 7456 - protein, 16 aa, Artificial Sequence
  source: /note="Description of Artificial Sequence: Synthetic peptide"
  MOD_RES (9)..(9): Citrulline
GGGAPAASXGSWSSAP

SEQ ID NO: 7457 - protein, 16 aa, Artificial Sequence
  source: /note="Description of Artificial Sequence: Synthetic peptide"
  MOD_RES (5)..(5): Citrulline
  MOD_RES (15)..(15): Citrulline
PAASXGSWSSAPTSXA

SEQ ID NO: 7458 - protein, 16 aa, Artificial Sequence
  source: /note="Description of Artificial Sequence: Synthetic peptide"
  MOD_RES (1)..(1): Citrulline
  MOD_RES (11)..(11): Citrulline
XGSWSSAPTSXASSPP

SEQ ID NO: 7459 - protein, 16 aa, Artificial Sequence
  source: /note="Description of Artificial Sequence: Synthetic peptide"
  MOD_RES (12)..(12): Citrulline
KPSCAGAAWSAXGAPL

SEQ ID NO: 7460 - protein, 16 aa, Artificial Sequence
  source: /note="Description of Artificial Sequence: Synthetic peptide"
  MOD_RES (8)..(8): Citrulline
  MOD_RES (16)..(16): Citrulline
AGAAWSAXGAPLCSYX

SEQ ID NO: 7461 - protein, 16 aa, Artificial Sequence
  source: /note="Description of Artificial Sequence: Synthetic peptide"
  MOD_RES (11)..(11): Citrulline
  MOD_RES (16)..(16): Citrulline
YHHHGKSDLSXGSPYX

SEQ ID NO: 7462 - protein, 16 aa, Artificial Sequence
  source: /note="Description of Artificial Sequence: Synthetic peptide"
  MOD_RES (7)..(7): Citrulline
  MOD_RES (12)..(12): Citrulline
GKSDLSXGSPYXESPL

SEQ ID NO: 7463 - protein, 16 aa, Artificial Sequence
  source: /note="Description of Artificial Sequence: Synthetic peptide"
  MOD_RES (13)..(13): Citrulline
PDPANWEYKSLYXGDI

SEQ ID NO: 7464 - protein, 16 aa, Artificial Sequence
  source: /note="Description of Artificial Sequence: Synthetic peptide"
  MOD_RES (9)..(9): Citrulline
  MOD_RES (14)..(14): Citrulline
NWEYKSLYXGDIAXYK

SEQ ID NO: 7465 - protein, 16 aa, Artificial Sequence
  source: /note="Description of Artificial Sequence: Synthetic peptide"
  MOD_RES (5)..(5): Citrulline
  MOD_RES (12)..(12): Citrulline
SGEPXAGEKGAXGWKA

SEQ ID NO: 7466 - protein, 16 aa, Artificial Sequence
  source: /note="Description of Artificial Sequence: Synthetic peptide"
  MOD_RES (1)..(1): Citrulline
  MOD_RES (8)..(8): Citrulline
XAGEKGAXGWKAWMHQ

SEQ ID NO: 7467 - protein, 16 aa, Artificial Sequence
  source: /note="Description of Artificial Sequence: Synthetic peptide"
  MOD_RES (4)..(4): Citrulline
  MOD_RES (15)..(15): Citrulline
KGAXGWKAWMHQQEXG

SEQ ID NO: 7468 - protein, 16 aa, Artificial Sequence
  source: /note="Description of Artificial Sequence: Synthetic peptide"
  MOD_RES (12)..(12): Citrulline
YFVDKNFDKAYXGASL

SEQ ID NO: 7469 - protein, 16 aa, Artificial Sequence
  source: /note="Description of Artificial Sequence: Synthetic peptide"
  MOD_RES (8)..(8): Citrulline
KNFDKAYXGASLHDLE

SEQ ID NO: 7470 - protein, 16 aa, Artificial Sequence
  source: /note="Description of Artificial Sequence: Synthetic peptide"
  MOD_RES (4)..(4): Citrulline
KAYXGASLHDLEKTIE

SEQ ID NO: 7471 - protein, 16 aa, Artificial Sequence
  source: /note="Description of Artificial Sequence: Synthetic peptide"
  MOD_RES (10)..(10): Citrulline
EGLPPGGGTXGSLVPT

SEQ ID NO: 7472 - protein, 16 aa, Artificial Sequence
  source: /note="Description of Artificial Sequence: Synthetic peptide"
  MOD_RES (6)..(6): Citrulline
  MOD_RES (13)..(13): Citrulline
PGGGTXGSLVPTXPVP

SEQ ID NO: 7473 - protein, 16 aa, Artificial Sequence
  source: /note="Description of Artificial Sequence: Synthetic peptide"
  MOD_RES (12)..(12): Citrulline
VYLGEEYCGTSXGKNV

SEQ ID NO: 7474 - protein, 16 aa, Artificial Sequence
  source: /note="Description of Artificial Sequence: Synthetic peptide"
  MOD_RES (8)..(8): Citrulline
EEYCGTSXGKNVCTVL

SEQ ID NO: 7475 - protein, 16 aa, Artificial Sequence
  source: /note="Description of Artificial Sequence: Synthetic peptide"
  MOD_RES (9)..(9): Citrulline
  MOD_RES (13)..(13): Citrulline
FWVWKSLAXGWPXGLS

SEQ ID NO: 7476 - protein, 16 aa, Artificial Sequence
  source: /note="Description of Artificial Sequence: Synthetic peptide"
  MOD_RES (5)..(5): Citrulline
  MOD_RES (9)..(9): Citrulline
KSLAXGWPXGLSKLQV

SEQ ID NO: 7477 - protein, 16 aa, Artificial Sequence
  source: /note="Description of Artificial Sequence: Synthetic peptide"
  MOD_RES (1)..(1): Citrulline
  MOD_RES (5)..(5): Citrulline
XGWPXGLSKLQVPVPT

SEQ ID NO: 7478 - protein, 16 aa, Artificial Sequence
  source: /note="Description of Artificial Sequence: Synthetic peptide"
  MOD_RES (12)..(12): Citrulline
  MOD_RES (16)..(16): Citrulline
LFFGGKGAPLQXGDPX

SEQ ID NO: 7479 - protein, 16 aa, Artificial Sequence
  source: /note="Description of Artificial Sequence: Synthetic peptide"
  MOD_RES (8)..(8): Citrulline
  MOD_RES (12)..(12): Citrulline
GKGAPLQXGDPXLWDI

SEQ ID NO: 7480 - protein, 16 aa, Artificial Sequence
  source: /note="Description of Artificial Sequence: Synthetic peptide"
  MOD_RES (4)..(4): Citrulline
  MOD_RES (8)..(8): Citrulline
PLQXGDPXLWDIPLAT

SEQ ID NO: 7481 - protein, 16 aa, Artificial Sequence
  source: /note="Description of Artificial Sequence: Synthetic peptide"
  MOD_RES (9)..(9): Citrulline
NFFAYATGXGLMKEST

SEQ ID NO: 7482 - protein, 16 aa, Artificial Sequence
  source: /note="Description of Artificial Sequence: Synthetic peptide"
  MOD_RES (5)..(5): Citrulline
YATGXGLMKESTTTQL

SEQ ID NO: 7483 - protein, 16 aa, Artificial Sequence
  source: /note="Description of Artificial Sequence: Synthetic peptide"
  MOD_RES (13)..(13): Citrulline
  MOD_RES (16)..(16): Citrulline
FFQSAKASKIETXGTX

SEQ ID NO: 7484 - protein, 16 aa, Artificial Sequence
  source: /note="Description of Artificial Sequence: Synthetic peptide"
  MOD_RES (9)..(9): Citrulline
  MOD_RES (12)..(12): Citrulline
AKASKIETXGTXYQYC

SEQ ID NO: 7485 - protein, 16 aa, Artificial Sequence
  source: /note="Description of Artificial Sequence: Synthetic peptide"
  MOD_RES (12)..(12): Citrulline
TPPPVAPKPPSXGLLD

SEQ ID NO: 7486 - protein, 16 aa, Artificial Sequence
  source: /note="Description of Artificial Sequence: Synthetic peptide"
  MOD_RES (8)..(8): Citrulline
VAPKPPSXGLLDGLVN

SEQ ID NO: 7487 - protein, 16 aa, Artificial Sequence
  source: /note="Description of Artificial Sequence: Synthetic peptide"
  MOD_RES (4)..(4): Citrulline
PPSXGLLDGLVNGAAS

SEQ ID NO: 7488 - protein, 16 aa, Artificial Sequence
  source: /note="Description of Artificial Sequence: Synthetic peptide"
  MOD_RES (3)..(3): Citrulline
  MOD_RES (9)..(9): Citrulline
SAXMMSGSXGSSLNDT

SEQ ID NO: 7489 - protein, 16 aa, Artificial Sequence
  source: /note="Description of Artificial Sequence: Synthetic peptide"
  MOD_RES (5)..(5): Citrulline
  MOD_RES (16)..(16): Citrulline
MSGSXGSSLNDTYHSX

SEQ ID NO: 7490 - protein, 16 aa, Artificial Sequence
  source: /note="Description of Artificial Sequence: Synthetic peptide"
  MOD_RES (11)..(11): Citrulline
  MOD_RES (13)..(13): Citrulline
QSSGWTSLVQXGXLES

SEQ ID NO: 7491 - protein, 16 aa, Artificial Sequence
  source: /note="Description of Artificial Sequence: Synthetic peptide"
  MOD_RES (7)..(7): Citrulline
  MOD_RES (9)..(9): Citrulline
WTSLVQXGXLESEGNV

SEQ ID NO: 7492 - protein, 16 aa, Artificial Sequence
  source: /note="Description of Artificial Sequence: Synthetic peptide"
  MOD_RES (6)..(6): Citrulline
  MOD_RES (8)..(8): Citrulline
VGACGXAXGLFAGGSP

SEQ ID NO: 7493 - protein, 16 aa, Artificial Sequence
  source: /note="Description of Artificial Sequence: Synthetic peptide"
  MOD_RES (2)..(2): Citrulline
  MOD_RES (4)..(4): Citrulline
GXAXGLFAGGSPGACG

SEQ ID NO: 7494 - protein, 16 aa, Artificial Sequence
  source: /note="Description of Artificial Sequence: Synthetic peptide"
  MOD_RES (13)..(13): Citrulline
WKEYIQAGYSSPXGCL

SEQ ID NO: 7495 - protein, 16 aa, Artificial Sequence
  source: /note="Description of Artificial Sequence: Synthetic peptide"
  MOD_RES (9)..(9): Citrulline
IQAGYSSPXGCLYLKD

SEQ ID NO: 7496 - protein, 16 aa, Artificial Sequence
  source: /note="Description of Artificial Sequence: Synthetic peptide"
  MOD_RES (9)..(9): Citrulline
WNHFGSGYXGSSLNIM

SEQ ID NO: 7497 - protein, 16 aa, Artificial Sequence
  source: /note="Description of Artificial Sequence: Synthetic peptide"
  MOD_RES (5)..(5): Citrulline
  MOD_RES (13)..(13): Citrulline
GSGYXGSSLNIMXNLV

SEQ ID NO: 7498 - protein, 16 aa, Artificial Sequence
  source: /note="Description of Artificial Sequence: Synthetic peptide"
  MOD_RES (1)..(1): Citrulline
  MOD_RES (7)..(7): Citrulline
XVTNFFXGALQPQPEG

SEQ ID NO: 7499 - protein, 16 aa, Artificial Sequence
  source: /note="Description of Artificial Sequence: Synthetic peptide"
  MOD_RES (3)..(3): Citrulline
FFXGALQPQPEGAASD

SEQ ID NO: 7500 - protein, 16 aa, Artificial Sequence
  source: /note="Description of Artificial Sequence: Synthetic peptide"
  MOD_RES (6)..(6): Citrulline
EGIIAXGNAYSTAKGN

SEQ ID NO: 7501 - protein, 16 aa, Artificial Sequence
  source: /note="Description of Artificial Sequence: Synthetic peptide"
  MOD_RES (4)..(4): Citrulline
  MOD_RES (7)..(7): Citrulline
AGPXLPXGALSEHIET

SEQ ID NO: 7502 - protein, 16 aa, Artificial Sequence
  source: /note="Description of Artificial Sequence: Synthetic peptide"
  MOD_RES (3)..(3): Citrulline
  MOD_RES (15)..(15): Citrulline
LPXGALSEHIETQIXL

SEQ ID NO: 7503 - protein, 16 aa, Artificial Sequence
  source: /note="Description of Artificial Sequence: Synthetic peptide"
  MOD_RES (4)..(4): Citrulline
  MOD_RES (14)..(14): Citrulline
SLEXGTALFAQVQXGA

SEQ ID NO: 7504 - protein, 16 aa, Artificial Sequence
  source: /note="Description of Artificial Sequence: Synthetic peptide"
  MOD_RES (10)..(10): Citrulline
GTALFAQVQXGALPAP

SEQ ID NO: 7505 - protein, 16 aa, Artificial Sequence
  source: /note="Description of Artificial Sequence: Synthetic peptide"
  MOD_RES (6)..(6): Citrulline
FAQVQXGALPAPDPEL

SEQ ID NO: 7506 - protein, 16 aa, Artificial Sequence
  source: /note="Description of Artificial Sequence: Synthetic peptide"
  MOD_RES (6)..(6): Citrulline
LSLFLXGSLEEKMKYC

SEQ ID NO: 7507 - protein, 16 aa, Artificial Sequence
  source: /note="Description of Artificial Sequence: Synthetic peptide"
  MOD_RES (3)..(3): Citrulline
  MOD_RES (11)..(11): Citrulline
YIXNTSSISPXGYSSS

SEQ ID NO: 7508 - protein, 16 aa, Artificial Sequence
  source: /note="Description of Artificial Sequence: Synthetic peptide"
  MOD_RES (7)..(7): Citrulline
TSSISPXGYSSSSTPQ

SEQ ID NO: 7509 - protein, 16 aa, Artificial Sequence
  source: /note="Description of Artificial Sequence: Synthetic peptide"
  MOD_RES (3)..(3): Citrulline
SPXGYSSSSTPQQSNY

SEQ ID NO: 7510 - protein, 16 aa, Artificial Sequence
  source: /note="Description of Artificial Sequence: Synthetic peptide"
  MOD_RES (6)..(6): Citrulline
  MOD_RES (12)..(12): Citrulline
GGVADXHGGLKXGDQL

SEQ ID NO: 7511 - protein, 16 aa, Artificial Sequence
  source: /note="Description of Artificial Sequence: Synthetic peptide"
  MOD_RES (2)..(2): Citrulline
  MOD_RES (8)..(8): Citrulline
DXHGGLKXGDQLLSVN

SEQ ID NO: 7512 - protein, 16 aa, Artificial Sequence
  source: /note="Description of Artificial Sequence: Synthetic peptide"
  MOD_RES (4)..(4): Citrulline
GLKXGDQLLSVNGVSV

SEQ ID NO: 7513 - protein, 16 aa, Artificial Sequence
  source: /note="Description of Artificial Sequence: Synthetic peptide"
  MOD_RES (2)..(3): Citrulline
IXXGVVNNQQTDWSFK

SEQ ID NO: 7514 - protein, 16 aa, Artificial Sequence
  source: /note="Description of Artificial Sequence: Synthetic peptide"
  MOD_RES (13)..(13): Citrulline
YTMMGATENYKHXGIL

SEQ ID NO: 7515 - protein, 16 aa, Artificial Sequence
  source: /note="Description of Artificial Sequence: Synthetic peptide"
  MOD_RES (9)..(9): Citrulline
  MOD_RES (14)..(14): Citrulline
GATENYKHXGILPXAL

SEQ ID NO: 7516 - protein, 16 aa, Artificial Sequence
  source: /note="Description of Artificial Sequence: Synthetic peptide"
  MOD_RES (5)..(5): Citrulline
  MOD_RES (8)..(8): Citrulline
FIAKXLSXGAVFEGLG

SEQ ID NO: 7517 - protein, 16 aa, Artificial Sequence
  source: /note="Description of Artificial Sequence: Synthetic peptide"
  MOD_RES (1)..(1): Citrulline
  MOD_RES (4)..(4): Citrulline
XLSXGAVFEGLGNVAS

SEQ ID NO: 7518 - protein, 16 aa, Artificial Sequence
  source: /note="Description of Artificial Sequence: Synthetic peptide"
  MOD_RES (7)..(7): Citrulline
IPSTPGXGGHLSMSLN

SEQ ID NO: 7519 - protein, 16 aa, Artificial Sequence
  source: /note="Description of Artificial Sequence: Synthetic peptide"
  MOD_RES (3)..(3): Citrulline
PGXGGHLSMSLNKDSA

SEQ ID NO: 7520 - protein, 16 aa, Artificial Sequence
  source: /note="Description of Artificial Sequence: Synthetic peptide"
  MOD_RES (6)..(6): Citrulline
  MOD_RES (13)..(13): Citrulline
SQDEGXGTLYKYXPEE

SEQ ID NO: 7521 - protein, 16 aa, Artificial Sequence
  source: /note="Description of Artificial Sequence: Synthetic peptide"
  MOD_RES (5)..(5): Citrulline
  MOD_RES (11)..(11): Citrulline
DLWKXLMIKFXGEEGL

SEQ ID NO: 7522 - protein, 16 aa, Artificial Sequence
  source: /note="Description of Artificial Sequence: Synthetic peptide"
  MOD_RES (1)..(1): Citrulline
  MOD_RES (7)..(7): Citrulline
XLMIKFXGEEGLDYGG

SEQ ID NO: 7523 - protein, 16 aa, Artificial Sequence
  source: /note="Description of Artificial Sequence: Synthetic peptide"
  MOD_RES (11)..(11): Citrulline
  MOD_RES (16)..(16): Citrulline
ILDTCGQYFDXGSSKX

SEQ ID NO: 7524 - protein, 16 aa, Artificial Sequence
  source: /note="Description of Artificial Sequence: Synthetic peptide"
  MOD_RES (7)..(7): Citrulline
  MOD_RES (12)..(12): Citrulline
CGQYFDXGSSKXKLDC

SEQ ID NO: 7525 - protein, 16 aa, Artificial Sequence
  source: /note="Description of Artificial Sequence: Synthetic peptide"
  MOD_RES (7)..(7): Citrulline
  MOD_RES (11)..(11): Citrulline
SYQPCNXQTGXGTSFF

SEQ ID NO: 7526 - protein, 16 aa, Artificial Sequence
  source: /note="Description of Artificial Sequence: Synthetic peptide"
  MOD_RES (3)..(3): Citrulline
  MOD_RES (7)..(7): Citrulline
CNXQTGXGTSFFPTAG

SEQ ID NO: 7527 - protein, 16 aa, Artificial Sequence
  source: /note="Description of Artificial Sequence: Synthetic peptide"
  MOD_RES (7)..(8): Citrulline
LLPATFXXGSALSEAD

SEQ ID NO: 7528 - protein, 16 aa, Artificial Sequence
  source: /note="Description of Artificial Sequence: Synthetic peptide"
  MOD_RES (3)..(4): Citrulline
TFXXGSALSEADSLAG

SEQ ID NO: 7529 - protein, 16 aa, Artificial Sequence
  source: /note="Description of Artificial Sequence: Synthetic peptide"
  MOD_RES (7)..(7): Citrulline
TLGACLXGALTNLPAG

SEQ ID NO: 7530 - protein, 16 aa, Artificial Sequence
  source: /note="Description of Artificial Sequence: Synthetic peptide"
  MOD_RES (3)..(3): Citrulline
CLXGALTNLPAGLSGL

SEQ ID NO: 7531 - protein, 16 aa, Artificial Sequence
  source: /note="Description of Artificial Sequence: Synthetic peptide"
  MOD_RES (8)..(8): Citrulline
ILFDIVSXGSTADLDG

SEQ ID NO: 7532 - protein, 16 aa, Artificial Sequence
  source: /note="Description of Artificial Sequence: Synthetic peptide"
  MOD_RES (4)..(4): Citrulline
IVSXGSTADLDGLLPF

SEQ ID NO: 7533 - protein, 16 aa, Artificial Sequence
  source: /note="Description of Artificial Sequence: Synthetic peptide"
  MOD_RES (12)..(12): Citrulline
MGGSAPPDSSWXGSLK

SEQ ID NO: 7534 - protein, 16 aa, Artificial Sequence
  source: /note="Description of Artificial Sequence: Synthetic peptide"
  MOD_RES (8)..(8): Citrulline
APPDSSWXGSLKVSYN

SEQ ID NO: 7535 - protein, 16 aa, Artificial Sequence
  source: /note="Description of Artificial Sequence: Synthetic peptide"
  MOD_RES (4)..(4): Citrulline
SSWXGSLKVSYNVGPG

SEQ ID NO: 7536 - protein, 16 aa, Artificial Sequence
  source: /note="Description of Artificial Sequence: Synthetic peptide"
  MOD_RES (5)..(5): Citrulline
  MOD_RES (7)..(7): Citrulline
WAAVXAXGCQFLGPAM

SEQ ID NO: 7537 - protein, 16 aa, Artificial Sequence
  source: /note="Description of Artificial Sequence: Synthetic peptide"
  MOD_RES (1)..(1): Citrulline
  MOD_RES (3)..(3): Citrulline
XAXGCQFLGPAMQEEA

SEQ ID NO: 7538 - protein, 16 aa, Artificial Sequence
  source: /note="Description of Artificial Sequence: Synthetic peptide"
  MOD_RES (6)..(6): Citrulline
IETGPXGVKLKGCPNE

SEQ ID NO: 7539 - protein, 16 aa, Artificial Sequence
  source: /note="Description of Artificial Sequence: Synthetic peptide"
  MOD_RES (2)..(2): Citrulline
PXGVKLKGCPNEPNFG

SEQ ID NO: 7540 - protein, 16 aa, Artificial Sequence
  source: /note="Description of Artificial Sequence: Synthetic peptide"
  MOD_RES (9)..(9): Citrulline
EKSKLQLPXGMITFES

SEQ ID NO: 7541 - protein, 16 aa, Artificial Sequence
  source: /note="Description of Artificial Sequence: Synthetic peptide"
  MOD_RES (8)..(8): Citrulline
  MOD_RES (11)..(11): Citrulline
LAIHGTGXIVXGQTQD

SEQ ID NO: 7542 - protein, 16 aa, Artificial Sequence
  source: /note="Description of Artificial Sequence: Synthetic peptide"
  MOD_RES (4)..(4): Citrulline
  MOD_RES (7)..(7): Citrulline
GTGXIVXGQTQDSLSL

SEQ ID NO: 7543 - protein, 16 aa, Artificial Sequence
  source: /note="Description of Artificial Sequence: Synthetic peptide"
  MOD_RES (11)..(11): Citrulline
TGEKSSDIFVXGWLKG

SEQ ID NO: 7544 - protein, 16 aa, Artificial Sequence
  source: /note="Description of Artificial Sequence: Synthetic peptide"
  MOD_RES (7)..(7): Citrulline
SSDIFVXGWLKGQQED

SEQ ID NO: 7545 - protein, 16 aa, Artificial Sequence
  source: /note="Description of Artificial Sequence: Synthetic peptide"
  MOD_RES (3)..(3): Citrulline
FVXGWLKGQQEDKQDT

SEQ ID NO: 7546 - protein, 16 aa, Artificial Sequence
  source: /note="Description of Artificial Sequence: Synthetic peptide"
  MOD_RES (5)..(5): Citrulline
  MOD_RES (8)..(8): Citrulline
LDLNXFPXGAKTAKQC

SEQ ID NO: 7547 - protein, 16 aa, Artificial Sequence
  source: /note="Description of Artificial Sequence: Synthetic peptide"
  MOD_RES (1)..(1): Citrulline
  MOD_RES (4)..(4): Citrulline
XFPXGAKTAKQCTMEM

SEQ ID NO: 7548 - protein, 16 aa, Artificial Sequence
  source: /note="Description of Artificial Sequence: Synthetic peptide"
  MOD_RES (9)..(9): Citrulline
  MOD_RES (16)..(16): Citrulline
EMLTELVHXGSVYDAX

SEQ ID NO: 7549 - protein, 16 aa, Artificial Sequence
  source: /note="Description of Artificial Sequence: Synthetic peptide"
  MOD_RES (13)..(13): Citrulline
  MOD_RES (15)..(15): Citrulline
DSASQGLGPSLLXGXL

SEQ ID NO: 7550 - protein, 16 aa, Artificial Sequence
  source: /note="Description of Artificial Sequence: Synthetic peptide"
  MOD_RES (9)..(9): Citrulline
  MOD_RES (11)..(11): Citrulline
QGLGPSLLXGXLPTLL

SEQ ID NO: 7551 - protein, 16 aa, Artificial Sequence
  source: /note="Description of Artificial Sequence: Synthetic peptide"
  MOD_RES (8)..(8): Citrulline
  MOD_RES (11)..(11): Citrulline
LSSAFKLXITXGDIQT

SEQ ID NO: 7552 - protein, 16 aa, Artificial Sequence
  source: /note="Description of Artificial Sequence: Synthetic peptide"
  MOD_RES (4)..(4): Citrulline
  MOD_RES (7)..(7): Citrulline
FKLXITXGDIQTLKNY

SEQ ID NO: 7553 - protein, 16 aa, Artificial Sequence
  source: /note="Description of Artificial Sequence: Synthetic peptide"
  MOD_RES (3)..(3): Citrulline
ITXGDIQTLKNYHWLN

SEQ ID NO: 7554 - protein, 16 aa, Artificial Sequence
  source: /note="Description of Artificial Sequence: Synthetic peptide"
  MOD_RES (2)..(2): Citrulline
  MOD_RES (9)..(9): Citrulline
SXAGVILNXGFPILEA

SEQ ID NO: 7555 - protein, 16 aa, Artificial Sequence
  source: /note="Description of Artificial Sequence: Synthetic peptide"
  MOD_RES (5)..(5): Citrulline
VILNXGFPILEADKEK

SEQ ID NO: 7556 - protein, 16 aa, Artificial Sequence
  source: /note="Description of Artificial Sequence: Synthetic peptide"
  MOD_RES (10)..(10): Citrulline
  MOD_RES (16)..(16): Citrulline
AKPKQPFLKXGEGLAX

SEQ ID NO: 7557 - protein, 16 aa, Artificial Sequence
  source: /note="Description of Artificial Sequence: Synthetic peptide"
  MOD_RES (6)..(6): Citrulline
  MOD_RES (12)..(12): Citrulline
QPFLKXGEGLAXFTNA

SEQ ID NO: 7558 - protein, 16 aa, Artificial Sequence
  source: /note="Description of Artificial Sequence: Synthetic peptide"
  MOD_RES (6)..(6): Citrulline
  MOD_RES (9)..(9): Citrulline
LNVHMXLHXGEKSYEC

SEQ ID NO: 7559 - protein, 16 aa, Artificial Sequence
  source: /note="Description of Artificial Sequence: Synthetic peptide"
  MOD_RES (14)..(14): Citrulline
PPVWISTTTTPTTXGS

SEQ ID NO: 7560 - protein, 16 aa, Artificial Sequence
  source: /note="Description of Artificial Sequence: Synthetic peptide"
  MOD_RES (10)..(10): Citrulline
ISTTTTPTTXGSTVTP

SEQ ID NO: 7561 - protein, 16 aa, Artificial Sequence
  source: /note="Description of Artificial Sequence: Synthetic peptide"
  MOD_RES (6)..(6): Citrulline
TTPTTXGSTVTPSSIP

SEQ ID NO: 7562 - protein, 16 aa, Artificial Sequence
  source: /note="Description of Artificial Sequence: Synthetic peptide"
  MOD_RES (11)..(11): Citrulline
WISTTTTPTTXGSTVT

SEQ ID NO: 7563 - protein, 16 aa, Artificial Sequence
  source: /note="Description of Artificial Sequence: Synthetic peptide"
  MOD_RES (7)..(7): Citrulline
TTTPTTXGSTVTPSSI

SEQ ID NO: 7564 - protein, 16 aa, Artificial Sequence
  source: /note="Description of Artificial Sequence: Synthetic peptide"
  MOD_RES (3)..(3): Citrulline
TTXGSTVTPSSIPGTT

SEQ ID NO: 7565 - protein, 16 aa, Artificial Sequence
  source: /note="Description of Artificial Sequence: Synthetic peptide"
  MOD_RES (10)..(10): Citrulline
  MOD_RES (14)..(14): Citrulline
PGTTTPGHTXGTSXTT

SEQ ID NO: 7566 - protein, 16 aa, Artificial Sequence
  source: /note="Description of Artificial Sequence: Synthetic peptide"
  MOD_RES (6)..(6): Citrulline
  MOD_RES (10)..(10): Citrulline
TPGHTXGTSXTTATAT

SEQ ID NO: 7567 - protein, 16 aa, Artificial Sequence
  source: /note="Description of Artificial Sequence: Synthetic peptide"
  MOD_RES (2)..(2): Citrulline
  MOD_RES (6)..(6): Citrulline
TXGTSXTTATATPSKT

SEQ ID NO: 7568 - protein, 16 aa, Artificial Sequence
  source: /note="Description of Artificial Sequence: Synthetic peptide"
  MOD_RES (9)..(9): Citrulline
  MOD_RES (13)..(13): Citrulline
SCPDVSSCXGSLXKTG

SEQ ID NO: 7569 - protein, 16 aa, Artificial Sequence
  source: /note="Description of Artificial Sequence: Synthetic peptide"
  MOD_RES (5)..(5): Citrulline
  MOD_RES (9)..(9): Citrulline
VSSCXGSLXKTGCCYS

SEQ ID NO: 7570 - protein, 16 aa, Artificial Sequence
  source: /note="Description of Artificial Sequence: Synthetic peptide"
  MOD_RES (12)..(12): Citrulline
CVPAPMAPPHTXGFPA

SEQ ID NO: 7571 - protein, 16 aa, Artificial Sequence
  source: /note="Description of Artificial Sequence: Synthetic peptide"
  MOD_RES (8)..(8): Citrulline
PMAPPHTXGFPAQEAT

SEQ ID NO: 7572 - protein, 16 aa, Artificial Sequence
  source: /note="Description of Artificial Sequence: Synthetic peptide"
  MOD_RES (8)..(8): Citrulline
  MOD_RES (12)..(12): Citrulline
EWGTVQLXGSWXVGQT

SEQ ID NO: 7573 - protein, 16 aa, Artificial Sequence
  source: /note="Description of Artificial Sequence: Synthetic peptide"
  MOD_RES (4)..(4): Citrulline
  MOD_RES (8)..(8): Citrulline
VQLXGSWXVGQTAGGS

SEQ ID NO: 7574 - protein, 16 aa, Artificial Sequence
  source: /note="Description of Artificial Sequence: Synthetic peptide"
  MOD_RES (13)..(13): Citrulline
SLADFQIEKKIGXGQF

SEQ ID NO: 7575 - protein, 16 aa, Artificial Sequence
  source: /note="Description of Artificial Sequence: Synthetic peptide"
  MOD_RES (9)..(9): Citrulline
FQIEKKIGXGQFSEVY

SEQ ID NO: 7576 - protein, 16 aa, Artificial Sequence
  source: /note="Description of Artificial Sequence: Synthetic peptide"
  MOD_RES (8)..(9): Citrulline
QDPMASFXXGVLEPLE

SEQ ID NO: 7577 - protein, 16 aa, Artificial Sequence
  source: /note="Description of Artificial Sequence: Synthetic peptide"
  MOD_RES (4)..(5): Citrulline
ASFXXGVLEPLENLHK

SEQ ID NO: 7578 - protein, 16 aa, Artificial Sequence
  source: /note="Description of Artificial Sequence: Synthetic peptide"
  MOD_RES (7)..(7): Citrulline
  MOD_RES (13)..(13): Citrulline
MLANGSXGDLLEXVSQ

SEQ ID NO: 7579 - protein, 16 aa, Artificial Sequence
  source: /note="Description of Artificial Sequence: Synthetic peptide"
  MOD_RES (11)..(11): Citrulline
ETLTETVYGDXGQLIK

SEQ ID NO: 7580 - protein, 16 aa, Artificial Sequence
  source: /note="Description of Artificial Sequence: Synthetic peptide"
  MOD_RES (7)..(7): Citrulline
  MOD_RES (16)..(16): Citrulline
ETVYGDXGQLIKSKEX

SEQ ID NO: 7581 - protein, 16 aa, Artificial Sequence
  source: /note="Description of Artificial Sequence: Synthetic peptide"
  MOD_RES (8)..(9): Citrulline
LFLEEWKXXGAELAYK

SEQ ID NO: 7582 - protein, 16 aa, Artificial Sequence
  source: /note="Description of Artificial Sequence: Synthetic peptide"
  MOD_RES (4)..(5): Citrulline
EWKXXGAELAYKWGTL

SEQ ID NO: 7583 - protein, 16 aa, Artificial Sequence
  source: /note="Description of Artificial Sequence: Synthetic peptide"
  MOD_RES (10)..(10): Citrulline
EQLEAKGGIXGAVALG

SEQ ID NO: 7584 - protein, 16 aa, Artificial Sequence
  source: /note="Description of Artificial Sequence: Synthetic peptide"
  MOD_RES (6)..(6): Citrulline
AKGGIXGAVALGTNSL

SEQ ID NO: 7585 - protein, 16 aa, Artificial Sequence
  source: /note="Description of Artificial Sequence: Synthetic peptide"
  MOD_RES (2)..(2): Citrulline
IXGAVALGTNSLKQQE

SEQ ID NO: 7586 - protein, 16 aa, Artificial Sequence
  source: /note="Description of Artificial Sequence: Synthetic peptide"
  MOD_RES (13)..(13): Citrulline
QNAIQMFHQYSFXGKD

SEQ ID NO: 7587 - protein, 16 aa, Artificial Sequence
  source: /note="Description of Artificial Sequence: Synthetic peptide"
  MOD_RES (9)..(9): Citrulline
QMFHQYSFXGKDLIVQ

SEQ ID NO: 7588 - protein, 16 aa, Artificial Sequence
  source: /note="Description of Artificial Sequence: Synthetic peptide"
  MOD_RES (5)..(5): Citrulline
QYSFXGKDLIVQLQPT

SEQ ID NO: 7589 - protein, 16 aa, Artificial Sequence
  source: /note="Description of Artificial Sequence: Synthetic peptide"
  MOD_RES (10)..(10): Citrulline
GPNEIGNFGXGDVLPP

SEQ ID NO: 7590 - protein, 16 aa, Artificial Sequence
  source: /note="Description of Artificial Sequence: Synthetic peptide"
  MOD_RES (6)..(6): Citrulline
IGNFGXGDVLPPVPGQ

SEQ ID NO: 7591 - protein, 16 aa, Artificial Sequence
  source: /note="Description of Artificial Sequence: Synthetic peptide"
  MOD_RES (2)..(2): Citrulline
GXGDVLPPVPGQGDKT

SEQ ID NO: 7592 - protein, 16 aa, Artificial Sequence
  source: /note="Description of Artificial Sequence: Synthetic peptide"
  MOD_RES (5)..(5): Citrulline
  MOD_RES (10)..(10): Citrulline
FKPTXIIYYXGGVSEG

SEQ ID NO: 7593 - protein, 16 aa, Artificial Sequence
  source: /note="Description of Artificial Sequence: Synthetic peptide"
  MOD_RES (1)..(1): Citrulline
  MOD_RES (6)..(6): Citrulline
XIIYYXGGVSEGQMKQ

SEQ ID NO: 7594 - protein, 16 aa, Artificial Sequence
  source: /note="Description of Artificial Sequence: Synthetic peptide"
  MOD_RES (10)..(10): Citrulline
  MOD_RES (12)..(12): Citrulline
QYEMYCKDSXGXLIPG

SEQ ID NO: 7595 - protein, 16 aa, Artificial Sequence
  source: /note="Description of Artificial Sequence: Synthetic peptide"
  MOD_RES (6)..(6): Citrulline
  MOD_RES (8)..(8): Citrulline
YCKDSXGXLIPGAYKF

SEQ ID NO: 7596 - protein, 16 aa, Artificial Sequence
  source: /note="Description of Artificial Sequence: Synthetic peptide"
  MOD_RES (2)..(2): Citrulline
  MOD_RES (4)..(4): Citrulline
SXGXLIPGAYKFDALI

SEQ ID NO: 7597 - protein, 16 aa, Artificial Sequence
  source: /note="Description of Artificial Sequence: Synthetic peptide"
  MOD_RES (7)..(7): Citrulline
  MOD_RES (11)..(11): Citrulline
HDGELLXGAAXHGVSQ

SEQ ID NO: 7598 - protein, 16 aa, Artificial Sequence
  source: /note="Description of Artificial Sequence: Synthetic peptide"
  MOD_RES (3)..(3): Citrulline
  MOD_RES (7)..(7): Citrulline
LLXGAAXHGVSQTDCN

SEQ ID NO: 7599 - protein, 16 aa, Artificial Sequence
  source: /note="Description of Artificial Sequence: Synthetic peptide"
  MOD_RES (7)..(8): Citrulline
AQFTKLXXGMDEKEFT

SEQ ID NO: 7600 - protein, 16 aa, Artificial Sequence
  source: /note="Description of Artificial Sequence: Synthetic peptide"
  MOD_RES (3)..(4): Citrulline
KLXXGMDEKEFTVQIK

SEQ ID NO: 7601 - protein, 16 aa, Artificial Sequence
  source: /note="Description of Artificial Sequence: Synthetic peptide"
  MOD_RES (2)..(2): Citrulline
  MOD_RES (11)..(11): Citrulline
PXEGGTKVTIXGENLG

SEQ ID NO: 7602 - protein, 16 aa, Artificial Sequence
  source: /note="Description of Artificial Sequence: Synthetic peptide"
  MOD_RES (9)..(9): Citrulline
ETIFSTAHXGSALPLA

SEQ ID NO: 7603 - protein, 16 aa, Artificial Sequence
  source: /note="Description of Artificial Sequence: Synthetic peptide"
  MOD_RES (5)..(5): Citrulline
STAHXGSALPLAIKYM

SEQ ID NO: 7604 - protein, 16 aa, Artificial Sequence
  source: /note="Description of Artificial Sequence: Synthetic peptide"
  MOD_RES (13)..(13): Citrulline
QPQASAEAPFAAXGIY

SEQ ID NO: 7605 - protein, 16 aa, Artificial Sequence
  source: /note="Description of Artificial Sequence: Synthetic peptide"
  MOD_RES (9)..(9): Citrulline
SAEAPFAAXGIYSEEM

SEQ ID NO: 7606 - protein, 16 aa, Artificial Sequence
  source: /note="Description of Artificial Sequence: Synthetic peptide"
  MOD_RES (5)..(5): Citrulline
PFAAXGIYSEEMPSVA

SEQ ID NO: 7607 - protein, 16 aa, Artificial Sequence
  source: /note="Description of Artificial Sequence: Synthetic peptide"
  MOD_RES (10)..(10): Citrulline
LHPSDLILTXGTLDEE

SEQ ID NO: 7608 - protein, 16 aa, Artificial Sequence
  source: /note="Description of Artificial Sequence: Synthetic peptide"
  MOD_RES (6)..(6): Citrulline
DLILTXGTLDEEDEEA

SEQ ID NO: 7609 - protein, 16 aa, Artificial Sequence
  source: /note="Description of Artificial Sequence: Synthetic peptide"
  MOD_RES (8)..(8): Citrulline
GALAYAGXGLLEASQD

SEQ ID NO: 7610 - protein, 16 aa, Artificial Sequence
  source: /note="Description of Artificial Sequence: Synthetic peptide"
  MOD_RES (12)..(12): Citrulline
SKENYDKYSEPXGYPK

SEQ ID NO: 7611 - protein, 16 aa, Artificial Sequence
  source: /note="Description of Artificial Sequence: Synthetic peptide"
  MOD_RES (8)..(8): Citrulline
  MOD_RES (15)..(15): Citrulline
YDKYSEPXGYPKGEXS

SEQ ID NO: 7612 - protein, 16 aa, Artificial Sequence
  source: /note="Description of Artificial Sequence: Synthetic peptide"
  MOD_RES (8)..(8): Citrulline
SIMSGNAXGQFYLDAQ

SEQ ID NO: 7613 - protein, 16 aa, Artificial Sequence
  source: /note="Description of Artificial Sequence: Synthetic peptide"
  MOD_RES (4)..(4): Citrulline
GNAXGQFYLDAQTGAL

SEQ ID NO: 7614 - protein, 16 aa, Artificial Sequence
  source: /note="Description of Artificial Sequence: Synthetic peptide"
  MOD_RES (10)..(10): Citrulline
PLEQCTGSSXGSSASE

SEQ ID NO: 7615 - protein, 16 aa, Artificial Sequence
  source: /note="Description of Artificial Sequence: Synthetic peptide"
  MOD_RES (6)..(6): Citrulline
  MOD_RES (15)..(15): Citrulline
CTGSSXGSSASEGSXG

SEQ ID NO: 7616 - protein, 16 aa, Artificial Sequence
  source: /note="Description of Artificial Sequence: Synthetic peptide"
  MOD_RES (2)..(2): Citrulline
  MOD_RES (11)..(11): Citrulline
SXGSSASEGSXGGPPP

SEQ ID NO: 7617 - protein, 16 aa, Artificial Sequence
  source: /note="Description of Artificial Sequence: Synthetic peptide"
  MOD_RES (5)..(5): Citrulline
  MOD_RES (8)..(8): Citrulline
VVHQXTHXGEKPNECK

SEQ ID NO: 7618 - protein, 16 aa, Artificial Sequence
  source: /note="Description of Artificial Sequence: Synthetic peptide"
  MOD_RES (1)..(1): Citrulline
  MOD_RES (4)..(4): Citrulline
XTHXGEKPNECKECGK

SEQ ID NO: 7619 - protein, 16 aa, Artificial Sequence
  source: /note="Description of Artificial Sequence: Synthetic peptide"
  MOD_RES (8)..(8): Citrulline
IAHQITHXGKKSYECN

SEQ ID NO: 7620 - protein, 16 aa, Artificial Sequence
  source: /note="Description of Artificial Sequence: Synthetic peptide"
  MOD_RES (4)..(4): Citrulline
ITHXGKKSYECNECGK

SEQ ID NO: 7621 - protein, 16 aa, Artificial Sequence
  source: /note="Description of Artificial Sequence: Synthetic peptide"
  MOD_RES (9)..(9): Citrulline
GSIVLPLAXGSPKALA

SEQ ID NO: 7622 - protein, 16 aa, Artificial Sequence
  source: /note="Description of Artificial Sequence: Synthetic peptide"
  MOD_RES (5)..(5): Citrulline
LPLAXGSPKALALEYA

SEQ ID NO: 7623 - protein, 16 aa, Artificial Sequence
  source: /note="Description of Artificial Sequence: Synthetic peptide"
  MOD_RES (11)..(11): Citrulline
  MOD_RES (14)..(14): Citrulline
FSVWAEKNGAXGSXQN

SEQ ID NO: 7624 - protein, 16 aa, Artificial Sequence
  source: /note="Description of Artificial Sequence: Synthetic peptide"
  MOD_RES (7)..(7): Citrulline
  MOD_RES (10)..(10): Citrulline
AEKNGAXGSXQNVSIS

SEQ ID NO: 7625 - protein, 16 aa, Artificial Sequence
  source: /note="Description of Artificial Sequence: Synthetic peptide"
  MOD_RES (3)..(3): Citrulline
  MOD_RES (6)..(6): Citrulline
GAXGSXQNVSISTVPN

SEQ ID NO: 7626 - protein, 16 aa, Artificial Sequence
  source: /note="Description of Artificial Sequence: Synthetic peptide"
  MOD_RES (4)..(4): Citrulline
  MOD_RES (9)..(9): Citrulline
LTQXSMFLXGEEILTP

SEQ ID NO: 7627 - protein, 16 aa, Artificial Sequence
  source: /note="Description of Artificial Sequence: Synthetic peptide"
  MOD_RES (5)..(5): Citrulline
SMFLXGEEILTPLNVQ

SEQ ID NO: 7628 - protein, 16 aa, Artificial Sequence
  source: /note="Description of Artificial Sequence: Synthetic peptide"
  MOD_RES (10)..(10): Citrulline
YAGEVQYDVXGILEKN

SEQ ID NO: 7629 - protein, 16 aa, Artificial Sequence
  source: /note="Description of Artificial Sequence: Synthetic peptide"
  MOD_RES (6)..(6): Citrulline
  MOD_RES (13)..(13): Citrulline
VQYDVXGILEKNXDTF

SEQ ID NO: 7630 - protein, 16 aa, Artificial Sequence
  source: /note="Description of Artificial Sequence: Synthetic peptide"
  MOD_RES (9)..(9): Citrulline
WLWKQFLKXGSKCSET

SEQ ID NO: 7631 - protein, 16 aa, Artificial Sequence
  source: /note="Description of Artificial Sequence: Synthetic peptide"
  MOD_RES (5)..(5): Citrulline
QFLKXGSKCSETSELL

SEQ ID NO: 7632 - protein, 16 aa, Artificial Sequence
  source: /note="Description of Artificial Sequence: Synthetic peptide"
  MOD_RES (5)..(5): Citrulline
  MOD_RES (13)..(13): Citrulline
SVTSXGDLATCPXGFA

SEQ ID NO: 7633 - protein, 16 aa, Artificial Sequence
  source: /note="Description of Artificial Sequence: Synthetic peptide"
  MOD_RES (1)..(1): Citrulline
  MOD_RES (9)..(9): Citrulline
XGDLATCPXGFAVTGC

SEQ ID NO: 7634 - protein, 16 aa, Artificial Sequence
  source: /note="Description of Artificial Sequence: Synthetic peptide"
  MOD_RES (13)..(13): Citrulline
SPLLPSFKQYWNXGEP

SEQ ID NO: 7635 - protein, 16 aa, Artificial Sequence
  source: /note="Description of Artificial Sequence: Synthetic peptide"
  MOD_RES (9)..(9): Citrulline
PSFKQYWNXGEPNNVG

SEQ ID NO: 7636 - protein, 16 aa, Artificial Sequence
  source: /note="Description of Artificial Sequence: Synthetic peptide"
  MOD_RES (6)..(6): Citrulline
  MOD_RES (11)..(11): Citrulline
AGLAGXVGTAXGAPLP

SEQ ID NO: 7637 - protein, 16 aa, Artificial Sequence
  source: /note="Description of Artificial Sequence: Synthetic peptide"
  MOD_RES (2)..(2): Citrulline
  MOD_RES (7)..(7): Citrulline
GXVGTAXGAPLPSYLL

SEQ ID NO: 7638 - protein, 16 aa, Artificial Sequence
  source: /note="Description of Artificial Sequence: Synthetic peptide"
  MOD_RES (5)..(5): Citrulline
  MOD_RES (11)..(11): Citrulline
PEGYXTQVGEXGLKLS

SEQ ID NO: 7639 - protein, 16 aa, Artificial Sequence
  source: /note="Description of Artificial Sequence: Synthetic peptide"
  MOD_RES (1)..(1): Citrulline
  MOD_RES (7)..(7): Citrulline
XTQVGEXGLKLSGGEK

SEQ ID NO: 7640 - protein, 16 aa, Artificial Sequence
  source: /note="Description of Artificial Sequence: Synthetic peptide"
  MOD_RES (12)..(12): Citrulline
EPAFGPCFSMPXGKPP

SEQ ID NO: 7641 - protein, 16 aa, Artificial Sequence
  source: /note="Description of Artificial Sequence: Synthetic peptide"
  MOD_RES (8)..(8): Citrulline
GPCFSMPXGKPPAPSP

SEQ ID NO: 7642 - protein, 16 aa, Artificial Sequence
  source: /note="Description of Artificial Sequence: Synthetic peptide"
  MOD_RES (4)..(4): Citrulline
  MOD_RES (13)..(13): Citrulline
SMPXGKPPAPSPXGQK

SEQ ID NO: 7643 - protein, 16 aa, Artificial Sequence
  source: /note="Description of Artificial Sequence: Synthetic peptide"
  MOD_RES (7)..(7): Citrulline
LILQIGXGTVVPEPFS

SEQ ID NO: 7644 - protein, 16 aa, Artificial Sequence
  source: /note="Description of Artificial Sequence: Synthetic peptide"
  MOD_RES (3)..(3): Citrulline
IGXGTVVPEPFSTESF

SEQ ID NO: 7645 - protein, 16 aa, Artificial Sequence
  source: /note="Description of Artificial Sequence: Synthetic peptide"
  MOD_RES (10)..(10): Citrulline
QAPGTAPCSXGSSWSA

SEQ ID NO: 7646 - protein, 16 aa, Artificial Sequence
  source: /note="Description of Artificial Sequence: Synthetic peptide"
  MOD_RES (6)..(6): Citrulline
TAPCSXGSSWSADLDK

SEQ ID NO: 7647 - protein, 16 aa, Artificial Sequence
  source: /note="Description of Artificial Sequence: Synthetic peptide"
  MOD_RES (10)..(11): Citrulline
ATVTLTGGFXXGKLQG

SEQ ID NO: 7648 - protein, 16 aa, Artificial Sequence
  source: /note="Description of Artificial Sequence: Synthetic peptide"
  MOD_RES (6)..(7): Citrulline
LTGGFXXGKLQGHDVD

SEQ ID NO: 7649 - protein, 16 aa, Artificial Sequence
  source: /note="Description of Artificial Sequence: Synthetic peptide"
  MOD_RES (2)..(3): Citrulline
FXXGKLQGHDVDFLIT

SEQ ID NO: 7650 - protein, 16 aa, Artificial Sequence
  source: /note="Description of Artificial Sequence: Synthetic peptide"
  MOD_RES (13)..(13): Citrulline
PKDPLQWLGSPPXGSC

SEQ ID NO: 7651 - protein, 16 aa, Artificial Sequence
  source: /note="Description of Artificial Sequence: Synthetic peptide"
  MOD_RES (8)..(8): Citrulline
  MOD_RES (11)..(11): Citrulline
VPGIFISXLVXGGLAE

SEQ ID NO: 7652 - protein, 16 aa, Artificial Sequence
  source: /note="Description of Artificial Sequence: Synthetic peptide"
  MOD_RES (4)..(4): Citrulline
  MOD_RES (7)..(7): Citrulline
FISXLVXGGLAESTGL

SEQ ID NO: 7653 - protein, 16 aa, Artificial Sequence
  source: /note="Description of Artificial Sequence: Synthetic peptide"
  MOD_RES (7)..(7): Citrulline
  MOD_RES (13)..(13): Citrulline
VCAAVTXCGFATXGVA

SEQ ID NO: 7654 - protein, 16 aa, Artificial Sequence
  source: /note="Description of Artificial Sequence: Synthetic peptide"
  MOD_RES (3)..(3): Citrulline
  MOD_RES (9)..(9): Citrulline
VTXCGFATXGVAGPGP

SEQ ID NO: 7655 - protein, 16 aa, Artificial Sequence
  source: /note="Description of Artificial Sequence: Synthetic peptide"
  MOD_RES (5)..(5): Citrulline
  MOD_RES (15)..(15): Citrulline
GFATXGVAGPGPIGXE

SEQ ID NO: 7656 - protein, 16 aa, Artificial Sequence
  source: /note="Description of Artificial Sequence: Synthetic peptide"
  MOD_RES (12)..(12): Citrulline
  MOD_RES (14)..(14): Citrulline
EPDNFSSKVVQXGXEF

SEQ ID NO: 7657 - protein, 16 aa, Artificial Sequence
  source: /note="Description of Artificial Sequence: Synthetic peptide"
  MOD_RES (8)..(8): Citrulline
  MOD_RES (10)..(10): Citrulline
FSSKVVQXGXEFFDSN

SEQ ID NO: 7658 - protein, 15 aa, Artificial Sequence
  source: /note="Description of Artificial Sequence: Synthetic peptide"
  MOD_RES (7)..(7): Citrulline
  MOD_RES (14)..(14): Citrulline
GTEGKSXGSSSSSXC

SEQ ID NO: 7659 - protein, 12 aa, Artificial Sequence
  source: /note="Description of Artificial Sequence: Synthetic peptide"
  MOD_RES (3)..(3): Citrulline
  MOD_RES (10)..(10): Citrulline
KSXGSSSSSXCL

SEQ ID NO: 7660 - protein, 16 aa, Artificial Sequence
  source: /note="Description of Artificial Sequence: Synthetic peptide"
  MOD_RES (11)..(11): Citrulline
QSSFTKSCYPXGTLSQ

SEQ ID NO: 7661 - protein, 16 aa, Artificial Sequence
  source: /note="Description of Artificial Sequence: Synthetic peptide"
  MOD_RES (7)..(7): Citrulline
TKSCYPXGTLSQAVDA

SEQ ID NO: 7662 - protein, 16 aa, Artificial Sequence
  source: /note="Description of Artificial Sequence: Synthetic peptide"
  MOD_RES (2)..(2): Citrulline
  MOD_RES (12)..(12): Citrulline
NXVIQPMGMSPXGHLT

SEQ ID NO: 7663 - protein, 16 aa, Artificial Sequence
  source: /note="Description of Artificial Sequence: Synthetic peptide"
  MOD_RES (8)..(8): Citrulline
QPMGMSPXGHLTSLQD

SEQ ID NO: 7664 - protein, 16 aa, Artificial Sequence
  source: /note="Description of Artificial Sequence: Synthetic peptide"
  MOD_RES (8)..(9): Citrulline
NPKAVFKXXGSQPGMQ

SEQ ID NO: 7665 - protein, 16 aa, Artificial Sequence
  source: /note="Description of Artificial Sequence: Synthetic peptide"
  MOD_RES (4)..(5): Citrulline
VFKXXGSQPGMQESDF

SEQ ID NO: 7666 - protein, 16 aa, Artificial Sequence
  source: /note="Description of Artificial Sequence: Synthetic peptide"
  MOD_RES (6)..(6): Citrulline
GFLVPXGTFPLDEDVS

SEQ ID NO: 7667 - protein, 16 aa, Artificial Sequence
  source: /note="Description of Artificial Sequence: Synthetic peptide"
  MOD_RES (2)..(2): Citrulline
PXGTFPLDEDVSYKVP

SEQ ID NO: 7668 - protein, 16 aa, Artificial Sequence
  source: /note="Description of Artificial Sequence: Synthetic peptide"
  MOD_RES (6)..(6): Citrulline
  MOD_RES (14)..(14): Citrulline
AAEPSXGPPLPSAXGA

SEQ ID NO: 7669 - protein, 16 aa, Artificial Sequence
  source: /note="Description of Artificial Sequence: Synthetic peptide"
  MOD_RES (2)..(2): Citrulline
  MOD_RES (10)..(10): Citrulline
SXGPPLPSAXGAPPSP

SEQ ID NO: 7670 - protein, 16 aa, Artificial Sequence
  source: /note="Description of Artificial Sequence: Synthetic peptide"
  MOD_RES (3)..(3): Citrulline
  MOD_RES (13)..(13): Citrulline
GGXGYLAYTGLGXGYQ

SEQ ID NO: 7671 - protein, 16 aa, Artificial Sequence
  source: /note="Description of Artificial Sequence: Synthetic peptide"
  MOD_RES (9)..(9): Citrulline
YLAYTGLGXGYQVKGD

SEQ ID NO: 7672 - protein, 16 aa, Artificial Sequence
  source: /note="Description of Artificial Sequence: Synthetic peptide"
  MOD_RES (5)..(5): Citrulline
  MOD_RES (14)..(14): Citrulline
TGLGXGYQVKGDKXED

SEQ ID NO: 7673 - protein, 16 aa, Artificial Sequence
  source: /note="Description of Artificial Sequence: Synthetic peptide"
  MOD_RES (6)..(6): Citrulline
LHNSAXGEVLGLSSSL

SEQ ID NO: 7674 - protein, 16 aa, Artificial Sequence
  source: /note="Description of Artificial Sequence: Synthetic peptide"
  MOD_RES (2)..(2): Citrulline
AXGEVLGLSSSLGKEL

SEQ ID NO: 7675 - protein, 16 aa, Artificial Sequence
  source: /note="Description of Artificial Sequence: Synthetic peptide"
  MOD_RES (5)..(5): Citrulline
  MOD_RES (11)..(11): Citrulline
LLLPXLDPGQXGNKLP

SEQ ID NO: 7676 - protein, 16 aa, Artificial Sequence
  source: /note="Description of Artificial Sequence: Synthetic peptide"
  MOD_RES (1)..(1): Citrulline
  MOD_RES (7)..(7): Citrulline
XLDPGQXGNKLPTGEQ

SEQ ID NO: 7677 - protein, 16 aa, Artificial Sequence
  source: /note="Description of Artificial Sequence: Synthetic peptide"
  MOD_RES (3)..(3): Citrulline
GQXGNKLPTGEQGLDE

SEQ ID NO: 7678 - protein, 16 aa, Artificial Sequence
  source: /note="Description of Artificial Sequence: Synthetic peptide"
  MOD_RES (7)..(7): Citrulline
  MOD_RES (9)..(9): Citrulline
KFEFECXAXGADILAY

SEQ ID NO: 7679 - protein, 16 aa, Artificial Sequence
  source: /note="Description of Artificial Sequence: Synthetic peptide"
  MOD_RES (3)..(3): Citrulline
  MOD_RES (5)..(5): Citrulline
ECXAXGADILAYPPVV

SEQ ID NO: 7680 - protein, 16 aa, Artificial Sequence
  source: /note="Description of Artificial Sequence: Synthetic peptide"
  MOD_RES (5)..(5): Citrulline
  MOD_RES (12)..(12): Citrulline
TSQSXSGSGSEXGGYK

SEQ ID NO: 7681 - protein, 16 aa, Artificial Sequence
  source: /note="Description of Artificial Sequence: Synthetic peptide"
  MOD_RES (1)..(1): Citrulline
  MOD_RES (8)..(8): Citrulline
XSGSGSEXGGYKGLNE

SEQ ID NO: 7682 - protein, 16 aa, Artificial Sequence
  source: /note="Description of Artificial Sequence: Synthetic peptide"
  MOD_RES (4)..(4): Citrulline
GSEXGGYKGLNEEVIT

SEQ ID NO: 7683 - protein, 16 aa, Artificial Sequence
  source: /note="Description of Artificial Sequence: Synthetic peptide"
  MOD_RES (12)..(12): Citrulline
STYIPGFSGSTXGNVF

SEQ ID NO: 7684 - protein, 16 aa, Artificial Sequence
  source: /note="Description of Artificial Sequence: Synthetic peptide"
  MOD_RES (8)..(8): Citrulline
PGFSGSTXGNVFASVD

SEQ ID NO: 7685 - protein, 16 aa, Artificial Sequence
  source: /note="Description of Artificial Sequence: Synthetic peptide"
  MOD_RES (4)..(4): Citrulline
  MOD_RES (14)..(14): Citrulline
GSTXGNVFASVDTXKG

SEQ ID NO: 7686 - protein, 16 aa, Artificial Sequence
  source: /note="Description of Artificial Sequence: Synthetic peptide"
  MOD_RES (9)..(9): Citrulline
IDLIDGKGXGVIATKQ

SEQ ID NO: 7687 - protein, 16 aa, Artificial Sequence
  source: /note="Description of Artificial Sequence: Synthetic peptide"
  MOD_RES (5)..(5): Citrulline
  MOD_RES (15)..(15): Citrulline
DGKGXGVIATKQFSXG

SEQ ID NO: 7688 - protein, 16 aa, Artificial Sequence
  source: /note="Description of Artificial Sequence: Synthetic peptide"
  MOD_RES (1)..(1): Citrulline
  MOD_RES (11)..(11): Citrulline
XGVIATKQFSXGDFVV

SEQ ID NO: 7689 - protein, 16 aa, Artificial Sequence
  source: /note="Description of Artificial Sequence: Synthetic peptide"
  MOD_RES (3)..(3): Citrulline
  MOD_RES (11)..(11): Citrulline
HPXKPIPTWAXGTPLS

SEQ ID NO: 7690 - protein, 16 aa, Artificial Sequence
  source: /note="Description of Artificial Sequence: Synthetic peptide"
  MOD_RES (8)..(8): Citrulline
  MOD_RES (10)..(10): Citrulline
ASSLDANXKXGSLLSE

SEQ ID NO: 7691 - protein, 16 aa, Artificial Sequence
  source: /note="Description of Artificial Sequence: Synthetic peptide"
  MOD_RES (4)..(4): Citrulline
  MOD_RES (6)..(6): Citrulline
DANXKXGSLLSEPAIQ

SEQ ID NO: 7692 - protein, 16 aa, Artificial Sequence
  source: /note="Description of Artificial Sequence: Synthetic peptide"
  MOD_RES (11)..(11): Citrulline
SAVHGCPQLSXGTPVD

SEQ ID NO: 7693 - protein, 16 aa, Artificial Sequence
  source: /note="Description of Artificial Sequence: Synthetic peptide"
  MOD_RES (7)..(7): Citrulline
  MOD_RES (14)..(14): Citrulline
GCPQLSXGTPVDEXLF

SEQ ID NO: 7694 - protein, 16 aa, Artificial Sequence
  source: /note="Description of Artificial Sequence: Synthetic peptide"
  MOD_RES (1)..(1): Citrulline
  MOD_RES (12)..(12): Citrulline
XVQLQPMKTVVXGSAM

SEQ ID NO: 7695 - protein, 16 aa, Artificial Sequence
  source: /note="Description of Artificial Sequence: Synthetic peptide"
  MOD_RES (8)..(8): Citrulline
QPMKTVVXGSAMPVDG

SEQ ID NO: 7696 - protein, 16 aa, Artificial Sequence
  source: /note="Description of Artificial Sequence: Synthetic peptide"
  MOD_RES (4)..(4): Citrulline
TVVXGSAMPVDGYISG

SEQ ID NO: 7697 - protein, 16 aa, Artificial Sequence
  source: /note="Description of Artificial Sequence: Synthetic peptide"
  MOD_RES (2)..(2): Citrulline
  MOD_RES (14)..(14): Citrulline
KXTQFGPVEGPLVXGS

SEQ ID NO: 7698 - protein, 16 aa, Artificial Sequence
  source: /note="Description of Artificial Sequence: Synthetic peptide"
  MOD_RES (10)..(10): Citrulline
FGPVEGPLVXGSELKD

SEQ ID NO: 7699 - protein, 16 aa, Artificial Sequence
  source: /note="Description of Artificial Sequence: Synthetic peptide"
  MOD_RES (6)..(6): Citrulline
EGPLVXGSELKDCYIH

SEQ ID NO: 7700 - protein, 16 aa, Artificial Sequence
  source: /note="Description of Artificial Sequence: Synthetic peptide"
  MOD_RES (2)..(2): Citrulline
VXGSELKDCYIHLKVS

SEQ ID NO: 7701 - protein, 16 aa, Artificial Sequence
  source: /note="Description of Artificial Sequence: Synthetic peptide"
  MOD_RES (4)..(4): Citrulline
  MOD_RES (12)..(12): Citrulline
LPSXLEGGSPAXGSAF

SEQ ID NO: 7702 - protein, 16 aa, Artificial Sequence
  source: /note="Description of Artificial Sequence: Synthetic peptide"
  MOD_RES (8)..(8): Citrulline
LEGGSPAXGSAFTSVP

SEQ ID NO: 7703 - protein, 16 aa, Artificial Sequence
  source: /note="Description of Artificial Sequence: Synthetic peptide"
  MOD_RES (4)..(4): Citrulline
SPAXGSAFTSVPQLGS

SEQ ID NO: 7704 - protein, 16 aa, Artificial Sequence
  source: /note="Description of Artificial Sequence: Synthetic peptide"
  MOD_RES (9)..(9): Citrulline
  MOD_RES (14)..(14): Citrulline
SWKEAPAPXGNLQXNK

SEQ ID NO: 7705 - protein, 16 aa, Artificial Sequence
  source: /note="Description of Artificial Sequence: Synthetic peptide"
  MOD_RES (5)..(5): Citrulline
  MOD_RES (10)..(10): Citrulline
APAPXGNLQXNKLPET

SEQ ID NO: 7706 - protein, 16 aa, Artificial Sequence
  source: /note="Description of Artificial Sequence: Synthetic peptide"
  MOD_RES (11)..(11): Citrulline
AAKIPDSIISXGVQVL

SEQ ID NO: 7707 - protein, 16 aa, Artificial Sequence
  source: /note="Description of Artificial Sequence: Synthetic peptide"
  MOD_RES (7)..(7): Citrulline
  MOD_RES (14)..(14): Citrulline
PDSIISXGVQVLPXDT

SEQ ID NO: 7708 - protein, 16 aa, Artificial Sequence
  source: /note="Description of Artificial Sequence: Synthetic peptide"
  MOD_RES (12)..(12): Citrulline
LPEPATLGFSAXGQGL

SEQ ID NO: 7709 - protein, 16 aa, Artificial Sequence
  source: /note="Description of Artificial Sequence: Synthetic peptide"
  MOD_RES (8)..(8): Citrulline
ATLGFSAXGQGLELGL

SEQ ID NO: 7710 - protein, 16 aa, Artificial Sequence
  source: /note="Description of Artificial Sequence: Synthetic peptide"
  MOD_RES (4)..(4): Citrulline
FSAXGQGLELGLPSTP

SEQ ID NO: 7711 - protein, 16 aa, Artificial Sequence
  source: /note="Description of Artificial Sequence: Synthetic peptide"
  MOD_RES (14)..(14): Citrulline
NSFECKDCGKAFSXGY

SEQ ID NO: 7712 - protein, 16 aa, Artificial Sequence
  source: /note="Description of Artificial Sequence: Synthetic peptide"
  MOD_RES (10)..(10): Citrulline
CKDCGKAFSXGYQLSQ

SEQ ID NO: 7713 - protein, 16 aa, Artificial Sequence
  source: /note="Description of Artificial Sequence: Synthetic peptide"
  MOD_RES (8)..(8): Citrulline
  MOD_RES (11)..(11): Citrulline
EEQPPQHXSKXGGSVG

SEQ ID NO: 7714 - protein, 16 aa, Artificial Sequence
  source: /note="Description of Artificial Sequence: Synthetic peptide"
  MOD_RES (4)..(4): Citrulline
  MOD_RES (7)..(7): Citrulline
PQHXSKXGGSVGGVCY

SEQ ID NO: 7715 - protein, 16 aa, Artificial Sequence
  source: /note="Description of Artificial Sequence: Synthetic peptide"
  MOD_RES (1)..(1): Citrulline
  MOD_RES (12)..(12): Citrulline
XNFWELLMNVKXGTYL

SEQ ID NO: 7716 - protein, 16 aa, Artificial Sequence
  source: /note="Description of Artificial Sequence: Synthetic peptide"
  MOD_RES (8)..(8): Citrulline
ELLMNVKXGTYLPQTY

SEQ ID NO: 7717 - protein, 16 aa, Artificial Sequence
  source: /note="Description of Artificial Sequence: Synthetic peptide"
  MOD_RES (10)..(10): Citrulline
  MOD_RES (12)..(12): Citrulline
YDTDYGSKSXGXQSQQ

SEQ ID NO: 7718 - protein, 16 aa, Artificial Sequence
  source: /note="Description of Artificial Sequence: Synthetic peptide"
  MOD_RES (10)..(11): Citrulline
TEKGACPPVXXGKNFS

SEQ ID NO: 7719 - protein, 16 aa, Artificial Sequence
  source: /note="Description of Artificial Sequence: Synthetic peptide"
  MOD_RES (6)..(7): Citrulline
ACPPVXXGKNFSSTSD

SEQ ID NO: 7720 - protein, 16 aa, Artificial Sequence
  source: /note="Description of Artificial Sequence: Synthetic peptide"
  MOD_RES (2)..(3): Citrulline
VXXGKNFSSTSDLSKP

SEQ ID NO: 7721 - protein, 16 aa, Artificial Sequence
  source: /note="Description of Artificial Sequence: Synthetic peptide"
  MOD_RES (8)..(8): Citrulline
AILAVTSXGTIKVIDG

SEQ ID NO: 7722 - protein, 16 aa, Artificial Sequence
  source: /note="Description of Artificial Sequence: Synthetic peptide"
  MOD_RES (4)..(4): Citrulline
VTSXGTIKVIDGTSGA

SEQ ID NO: 7723 - protein, 16 aa, Artificial Sequence
  source: /note="Description of Artificial Sequence: Synthetic peptide"
  MOD_RES (9)..(9): Citrulline
  MOD_RES (11)..(11): Citrulline
YFNEPGYEXSXGTPSG

SEQ ID NO: 7724 - protein, 16 aa, Artificial Sequence
  source: /note="Description of Artificial Sequence: Synthetic peptide"
  MOD_RES (5)..(5): Citrulline
  MOD_RES (7)..(7): Citrulline
PGYEXSXGTPSGTQSS

SEQ ID NO: 7725 - protein, 16 aa, Artificial Sequence
  source: /note="Description of Artificial Sequence: Synthetic peptide"
  MOD_RES (11)..(11): Citrulline
SLLITTDAFYXGEKLV

SEQ ID NO: 7726 - protein, 16 aa, Artificial Sequence
  source: /note="Description of Artificial Sequence: Synthetic peptide"
  MOD_RES (7)..(7): Citrulline
TTDAFYXGEKLVNLKE

SEQ ID NO: 7727 - protein, 16 aa, Artificial Sequence
  source: /note="Description of Artificial Sequence: Synthetic peptide"
  MOD_RES (3)..(3): Citrulline
FYXGEKLVNLKELADE

SEQ ID NO: 7728 - protein, 16 aa, Artificial Sequence
  source: /note="Description of Artificial Sequence: Synthetic peptide"
  MOD_RES (5)..(6): Citrulline
YLTVXXGEEIYGTISM

SEQ ID NO: 7729 - protein, 16 aa, Artificial Sequence
  source: /note="Description of Artificial Sequence: Synthetic peptide"
  MOD_RES (1)..(2): Citrulline
XXGEEIYGTISMKPNA

SEQ ID NO: 7730 - protein, 16 aa, Artificial Sequence
  source: /note="Description of Artificial Sequence: Synthetic peptide"
  MOD_RES (11)..(11): Citrulline
  MOD_RES (16)..(16): Citrulline
DLCYVKELGVXGNVLX

SEQ ID NO: 7731 - protein, 16 aa, Artificial Sequence
  source: /note="Description of Artificial Sequence: Synthetic peptide"
  MOD_RES (7)..(7): Citrulline
  MOD_RES (12)..(12): Citrulline
VKELGVXGNVLXFLPD

SEQ ID NO: 7732 - protein, 16 aa, Artificial Sequence
  source: /note="Description of Artificial Sequence: Synthetic peptide"
  MOD_RES (8)..(8): Citrulline
LAPGPLGXGTMPGKFP

SEQ ID NO: 7733 - protein, 16 aa, Artificial Sequence
  source: /note="Description of Artificial Sequence: Synthetic peptide"
  MOD_RES (4)..(4): Citrulline
PLGXGTMPGKFPHSDK

SEQ ID NO: 7734 - protein, 16 aa, Artificial Sequence
  source: /note="Description of Artificial Sequence: Synthetic peptide"
  MOD_RES (4)..(4): Citrulline
  MOD_RES (12)..(12): Citrulline
ETVXGEAPSQPXGIPH

SEQ ID NO: 7735 - protein, 16 aa, Artificial Sequence
  source: /note="Description of Artificial Sequence: Synthetic peptide"
  MOD_RES (8)..(8): Citrulline
  MOD_RES (13)..(13): Citrulline
GEAPSQPXGIPHXSPV

SEQ ID NO: 7736 - protein, 16 aa, Artificial Sequence
  source: /note="Description of Artificial Sequence: Synthetic peptide"
  MOD_RES (3)..(3): Citrulline
  MOD_RES (9)..(9): Citrulline
EVXLGGSLXGAFSNNE

SEQ ID NO: 7737 - protein, 16 aa, Artificial Sequence
  source: /note="Description of Artificial Sequence: Synthetic peptide"
  MOD_RES (5)..(5): Citrulline
  MOD_RES (13)..(13): Citrulline
GGSLXGAFSNNEXIKN

SEQ ID NO: 7738 - protein, 16 aa, Artificial Sequence
  source: /note="Description of Artificial Sequence: Synthetic peptide"
  MOD_RES (6)..(6): Citrulline
  MOD_RES (10)..(10): Citrulline
WSDALXSFSXGQLASG

SEQ ID NO: 7739 - protein, 16 aa, Artificial Sequence
  source: /note="Description of Artificial Sequence: Synthetic peptide"
  MOD_RES (2)..(2): Citrulline
  MOD_RES (6)..(6): Citrulline
LXSFSXGQLASGPDPA

SEQ ID NO: 7740 - protein, 16 aa, Artificial Sequence
  source: /note="Description of Artificial Sequence: Synthetic peptide"
  MOD_RES (5)..(5): Citrulline
  MOD_RES (14)..(14): Citrulline
QNGPXGLYAFGAEXGN

SEQ ID NO: 7741 - protein, 16 aa, Artificial Sequence
  source: /note="Description of Artificial Sequence: Synthetic peptide"
  MOD_RES (10)..(11): Citrulline
IYQHVINKEXXGDYLG

SEQ ID NO: 7742 - protein, 16 aa, Artificial Sequence
  source: /note="Description of Artificial Sequence: Synthetic peptide"
  MOD_RES (6)..(7): Citrulline
VINKEXXGDYLGKTVQ

SEQ ID NO: 7743 - protein, 16 aa, Artificial Sequence
  source: /note="Description of Artificial Sequence: Synthetic peptide"
  MOD_RES (2)..(3): Citrulline
EXXGDYLGKTVQVVPH

SEQ ID NO: 7744 - protein, 16 aa, Artificial Sequence
  source: /note="Description of Artificial Sequence: Synthetic peptide"
  MOD_RES (8)..(8): Citrulline
  MOD_RES (12)..(12): Citrulline
TSANAKYXYQKXGGFD

SEQ ID NO: 7745 - protein, 16 aa, Artificial Sequence
  source: /note="Description of Artificial Sequence: Synthetic peptide"
  MOD_RES (4)..(4): Citrulline
  MOD_RES (8)..(8): Citrulline
AKYXYQKXGGFDATDD

SEQ ID NO: 7746 - protein, 16 aa, Artificial Sequence
  source: /note="Description of Artificial Sequence: Synthetic peptide"
  MOD_RES (13)..(13): Citrulline
  MOD_RES (15)..(15): Citrulline
DKPQPDSKPTYSXGXS

SEQ ID NO: 7747 - protein, 16 aa, Artificial Sequence
  source: /note="Description of Artificial Sequence: Synthetic peptide"
  MOD_RES (9)..(9): Citrulline
  MOD_RES (11)..(11): Citrulline
PDSKPTYSXGXSSNAY

SEQ ID NO: 7748 - protein, 16 aa, Artificial Sequence
  source: /note="Description of Artificial Sequence: Synthetic peptide"
  MOD_RES (5)..(5): Citrulline
  MOD_RES (7)..(7): Citrulline
PTYSXGXSSNAYDPSQ

SEQ ID NO: 7749 - protein, 16 aa, Artificial Sequence
  source: /note="Description of Artificial Sequence: Synthetic peptide"
  MOD_RES (1)..(1): Citrulline
  MOD_RES (7)..(7): Citrulline
XLPVKTXGKLSSSFSS

SEQ ID NO: 7750 - protein, 16 aa, Artificial Sequence
  source: /note="Description of Artificial Sequence: Synthetic peptide"
  MOD_RES (3)..(3): Citrulline
  MOD_RES (13)..(13): Citrulline
KTXGKLSSSFSSXGQQ

SEQ ID NO: 7751 - protein, 16 aa, Artificial Sequence
  source: /note="Description of Artificial Sequence: Synthetic peptide"
  MOD_RES (9)..(9): Citrulline
KLSSSFSSXGQQQEPG

SEQ ID NO: 7752 - protein, 16 aa, Artificial Sequence
  source: /note="Description of Artificial Sequence: Synthetic peptide"
  MOD_RES (5)..(5): Citrulline
  MOD_RES (13)..(13): Citrulline
SFSSXGQQQEPGXYPS

SEQ ID NO: 7753 - protein, 16 aa, Artificial Sequence
  source: /note="Description of Artificial Sequence: Synthetic peptide"
  MOD_RES (10)..(10): Citrulline
  MOD_RES (14)..(14): Citrulline
DQHENSYYPXGDSXKV

SEQ ID NO: 7754 - protein, 16 aa, Artificial Sequence
  source: /note="Description of Artificial Sequence: Synthetic peptide"
  MOD_RES (6)..(6): Citrulline
  MOD_RES (10)..(10): Citrulline
NSYYPXGDSXKVPNSD

SEQ ID NO: 7755 - protein, 16 aa, Artificial Sequence
  source: /note="Description of Artificial Sequence: Synthetic peptide"
  MOD_RES (7)..(7): Citrulline
HPSHGSXGSVFYPEYN

SEQ ID NO: 7756 - protein, 16 aa, Artificial Sequence
  source: /note="Description of Artificial Sequence: Synthetic peptide"
  MOD_RES (3)..(3): Citrulline
GSXGSVFYPEYNPYDP

SEQ ID NO: 7757 - protein, 16 aa, Artificial Sequence
  source: /note="Description of Artificial Sequence: Synthetic peptide"
  MOD_RES (14)..(14): Citrulline
LDADEHSPFEFLQXGT

SEQ ID NO: 7758 - protein, 16 aa, Artificial Sequence
  source: /note="Description of Artificial Sequence: Synthetic peptide"
  MOD_RES (10)..(10): Citrulline
EHSPFEFLQXGTNVQD

SEQ ID NO: 7759 - protein, 16 aa, Artificial Sequence
  source: /note="Description of Artificial Sequence: Synthetic peptide"
  MOD_RES (6)..(6): Citrulline
FEFLQXGTNVQDQVQD

SEQ ID NO: 7760 - protein, 16 aa, Artificial Sequence
  source: /note="Description of Artificial Sequence: Synthetic peptide"
  MOD_RES (14)..(14): Citrulline
QVGIDIMKTSFPGXGS

SEQ ID NO: 7761 - protein, 16 aa, Artificial Sequence
  source: /note="Description of Artificial Sequence: Synthetic peptide"
  MOD_RES (10)..(10): Citrulline
DIMKTSFPGXGSIPEF

SEQ ID NO: 7762 - protein, 16 aa, Artificial Sequence
  source: /note="Description of Artificial Sequence: Synthetic peptide"
  MOD_RES (6)..(6): Citrulline
TSFPGXGSIPEFFHIM

SEQ ID NO: 7763 - protein, 16 aa, Artificial Sequence
  source: /note="Description of Artificial Sequence: Synthetic peptide"
  MOD_RES (2)..(2): Citrulline
  MOD_RES (9)..(9): Citrulline
AXNGTSPSXGSVQSEG

SEQ ID NO: 7764 - protein, 16 aa, Artificial Sequence
  source: /note="Description of Artificial Sequence: Synthetic peptide"
  MOD_RES (5)..(5): Citrulline
TSPSXGSVQSEGPGAP

SEQ ID NO: 7765 - protein, 16 aa, Artificial Sequence
  source: /note="Description of Artificial Sequence: Synthetic peptide"
  MOD_RES (12)..(12): Citrulline
LSTSLQEIPKSXGVLS

SEQ ID NO: 7766 - protein, 16 aa, Artificial Sequence
  source: /note="Description of Artificial Sequence: Synthetic peptide"
  MOD_RES (8)..(8): Citrulline
  MOD_RES (15)..(15): Citrulline
LQEIPKSXGVLSSEXG

SEQ ID NO: 7767 - protein, 16 aa, Artificial Sequence
  source: /note="Description of Artificial Sequence: Synthetic peptide"
  MOD_RES (4)..(4): Citrulline
  MOD_RES (11)..(11): Citrulline
PKSXGVLSSEXGSPSS

SEQ ID NO: 7768 - protein, 16 aa, Artificial Sequence
  source: /note="Description of Artificial Sequence: Synthetic peptide"
  MOD_RES (11)..(11): Citrulline
DGDSTKAPTTXGTPQT

SEQ ID NO: 7769 - protein, 16 aa, Artificial Sequence
  source: /note="Description of Artificial Sequence: Synthetic peptide"
  MOD_RES (7)..(7): Citrulline
TKAPTTXGTPQTPKDD

SEQ ID NO: 7770 - protein, 16 aa, Artificial Sequence
  source: /note="Description of Artificial Sequence: Synthetic peptide"
  MOD_RES (3)..(3): Citrulline
TTXGTPQTPKDDPAIT

SEQ ID NO: 7771 - protein, 16 aa, Artificial Sequence
  source: /note="Description of Artificial Sequence: Synthetic peptide"
  MOD_RES (9)..(9): Citrulline
  MOD_RES (11)..(11): Citrulline
AVVEYGGKXVXGSDLF

SEQ ID NO: 7772 - protein, 16 aa, Artificial Sequence
  source: /note="Description of Artificial Sequence: Synthetic peptide"
  MOD_RES (5)..(5): Citrulline
  MOD_RES (7)..(7): Citrulline
YGGKXVXGSDLFSPKD

SEQ ID NO: 7773 - protein, 16 aa, Artificial Sequence
  source: /note="Description of Artificial Sequence: Synthetic peptide"
  MOD_RES (1)..(1): Citrulline
  MOD_RES (3)..(3): Citrulline
XVXGSDLFSPKDAVAI

SEQ ID NO: 7774 - protein, 16 aa, Artificial Sequence
  source: /note="Description of Artificial Sequence: Synthetic peptide"
  MOD_RES (9)..(9): Citrulline
IDYMFFEKXGGAGPSA

SEQ ID NO: 7775 - protein, 15 aa, Artificial Sequence
  source: /note="Description of Artificial Sequence: Synthetic peptide"
  MOD_RES (5)..(5): Citrulline
FFEKXGGAGPSAVTS

SEQ ID NO: 7776 - protein, 16 aa, Artificial Sequence
  source: /note="Description of Artificial Sequence: Synthetic peptide"
  MOD_RES (10)..(10): Citrulline
LDAFALNMTXGAAYGA

SEQ ID NO: 7777 - protein, 16 aa, Artificial Sequence
  source: /note="Description of Artificial Sequence: Synthetic peptide"
  MOD_RES (6)..(6): Citrulline
  MOD_RES (14)..(14): Citrulline
ALNMTXGAAYGADXPF

SEQ ID NO: 7778 - protein, 16 aa, Artificial Sequence
  source: /note="Description of Artificial Sequence: Synthetic peptide"
  MOD_RES (3)..(3): Citrulline
  MOD_RES (13)..(13): Citrulline
AIXLANSTASVSXGSM

SEQ ID NO: 7779 - protein, 16 aa, Artificial Sequence
  source: /note="Description of Artificial Sequence: Synthetic peptide"
  MOD_RES (9)..(9): Citrulline
ANSTASVSXGSMQELD

SEQ ID NO: 7780 - protein, 16 aa, Artificial Sequence
  source: /note="Description of Artificial Sequence: Synthetic peptide"
  MOD_RES (5)..(5): Citrulline
ASVSXGSMQELDMLAG

SEQ ID NO: 7781 - protein, 16 aa, Artificial Sequence
  source: /note="Description of Artificial Sequence: Synthetic peptide"
  MOD_RES (8)..(9): Citrulline
IDDLHDFXXGLSKLGT

SEQ ID NO: 7782 - protein, 14 aa, Artificial Sequence
  source: /note="Description of Artificial Sequence: Synthetic peptide"
  MOD_RES (4)..(5): Citrulline
HDFXXGLSKLGTDN

SEQ ID NO: 7783 - protein, 16 aa, Artificial Sequence
  source: /note="Description of Artificial Sequence: Synthetic peptide"
  MOD_RES (2)..(2): Citrulline
  MOD_RES (10)..(10): Citrulline
VXGLQVFKEXIKAPVY

SEQ ID NO: 7784 - protein, 16 aa, Artificial Sequence
  source: /note="Description of Artificial Sequence: Synthetic peptide"
  MOD_RES (3)..(3): Citrulline
  MOD_RES (10)..(10): Citrulline
PGXCAEIFAXGQSVGK

SEQ ID NO: 7785 - protein, 16 aa, Artificial Sequence
  source: /note="Description of Artificial Sequence: Synthetic peptide"
  MOD_RES (6)..(6): Citrulline
AEIFAXGQSVGKLGVL

SEQ ID NO: 7786 - protein, 16 aa, Artificial Sequence
  source: /note="Description of Artificial Sequence: Synthetic peptide"
  MOD_RES (10)..(10): Citrulline
  MOD_RES (12)..(12): Citrulline
TQNAGGSYQXVXGALD

SEQ ID NO: 7787 - protein, 16 aa, Artificial Sequence
  source: /note="Description of Artificial Sequence: Synthetic peptide"
  MOD_RES (6)..(6): Citrulline
  MOD_RES (8)..(8): Citrulline
GGSYQXVXGALDTQKC

SEQ ID NO: 7788 - protein, 16 aa, Artificial Sequence
  source: /note="Description of Artificial Sequence: Synthetic peptide"
  MOD_RES (2)..(2): Citrulline
  MOD_RES (4)..(4): Citrulline
QXVXGALDTQKCSPEK

SEQ ID NO: 7789 - protein, 16 aa, Artificial Sequence
  source: /note="Description of Artificial Sequence: Synthetic peptide"
  MOD_RES (10)..(10): Citrulline
SPPNLVEIHXGKQLTG

SEQ ID NO: 7790 - protein, 16 aa, Artificial Sequence
  source: /note="Description of Artificial Sequence: Synthetic peptide"
  MOD_RES (6)..(6): Citrulline
LVEIHXGKQLTGCSTF

SEQ ID NO: 7791 - protein, 16 aa, Artificial Sequence
  source: /note="Description of Artificial Sequence: Synthetic peptide"
  MOD_RES (7)..(7): Citrulline
KHMIIHXGEKPYKYQE

SEQ ID NO: 7792 - protein, 16 aa, Artificial Sequence
  source: /note="Description of Artificial Sequence: Synthetic peptide"
  MOD_RES (11)..(11): Citrulline
VAALLSGAQAXGTPLL

SEQ ID NO: 7793 - protein, 16 aa, Artificial Sequence
  source: /note="Description of Artificial Sequence: Synthetic peptide"
  MOD_RES (7)..(7): Citrulline
  MOD_RES (14)..(14): Citrulline
LSGAQAXGTPLLAXPA

SEQ ID NO: 7794 - protein, 16 aa, Artificial Sequence
  source: /note="Description of Artificial Sequence: Synthetic peptide"
  MOD_RES (3)..(3): Citrulline
  MOD_RES (10)..(10): Citrulline
QAXGTPLLAXPAPPGA

SEQ ID NO: 7795 - protein, 16 aa, Artificial Sequence
  source: /note="Description of Artificial Sequence: Synthetic peptide"
  MOD_RES (8)..(8): Citrulline
  MOD_RES (11)..(11): Citrulline
CQNSLLCXGSXDPLDI

SEQ ID NO: 7796 - protein, 16 aa, Artificial Sequence
  source: /note="Description of Artificial Sequence: Synthetic peptide"
  MOD_RES (5)..(5): Citrulline
YLCQXGSDIFEYNSKG

SEQ ID NO: 7797 - protein, 16 aa, Artificial Sequence
  source: /note="Description of Artificial Sequence: Synthetic peptide"
  MOD_RES (8)..(8): Citrulline
LPLPPVPXGAQAAVSG

SEQ ID NO: 7798 - protein, 16 aa, Artificial Sequence
  source: /note="Description of Artificial Sequence: Synthetic peptide"
  MOD_RES (11)..(11): Citrulline
AVSGAPGGLLXGAPGL

SEQ ID NO: 7799 - protein, 16 aa, Artificial Sequence
  source: /note="Description of Artificial Sequence: Synthetic peptide"
  MOD_RES (7)..(7): Citrulline
  MOD_RES (15)..(15): Citrulline
APGGLLXGAPGLGVXG

SEQ ID NO: 7800 - protein, 16 aa, Artificial Sequence
  source: /note="Description of Artificial Sequence: Synthetic peptide"
  MOD_RES (1)..(1): Citrulline
  MOD_RES (10)..(10): Citrulline
XAGGAVLSGXGSLCFP

SEQ ID NO: 7801 - protein, 16 aa, Artificial Sequence
  source: /note="Description of Artificial Sequence: Synthetic peptide"
  MOD_RES (6)..(6): Citrulline
AVLSGXGSLCFPHGGT

SEQ ID NO: 7802 - protein, 16 aa, Artificial Sequence
  source: /note="Description of Artificial Sequence: Synthetic peptide"
  MOD_RES (7)..(7): Citrulline
  MOD_RES (13)..(13): Citrulline
DVSAGLXGSHGAXGEP

SEQ ID NO: 7803 - protein, 16 aa, Artificial Sequence
  source: /note="Description of Artificial Sequence: Synthetic peptide"
  MOD_RES (3)..(3): Citrulline
  MOD_RES (9)..(9): Citrulline
GLXGSHGAXGEPLDPA

SEQ ID NO: 7804 - protein, 16 aa, Artificial Sequence
  source: /note="Description of Artificial Sequence: Synthetic peptide"
  MOD_RES (5)..(5): Citrulline
  MOD_RES (13)..(13): Citrulline
SHGAXGEPLDPAXPLQ

SEQ ID NO: 7805 - protein, 16 aa, Artificial Sequence
  source: /note="Description of Artificial Sequence: Synthetic peptide"
  MOD_RES (3)..(3): Citrulline
  MOD_RES (11)..(11): Citrulline
LGXKTPPTLFXGSSLQ

SEQ ID NO: 7806 - protein, 16 aa, Artificial Sequence
  source: /note="Description of Artificial Sequence: Synthetic peptide"
  MOD_RES (7)..(7): Citrulline
TPPTLFXGSSLQQGVP

SEQ ID NO: 7807 - protein, 16 aa, Artificial Sequence
  source: /note="Description of Artificial Sequence: Synthetic peptide"
  MOD_RES (3)..(3): Citrulline
LFXGSSLQQGVPHGYA

SEQ ID NO: 7808 - protein, 16 aa, Artificial Sequence
  source: /note="Description of Artificial Sequence: Synthetic peptide"
  MOD_RES (10)..(10): Citrulline
  MOD_RES (12)..(12): Citrulline
EAKSSLAMNXSXGKVL

SEQ ID NO: 7809 - protein, 16 aa, Artificial Sequence
  source: /note="Description of Artificial Sequence: Synthetic peptide"
  MOD_RES (6)..(6): Citrulline
  MOD_RES (8)..(8): Citrulline
SLAMNXSXGKVLDAII

SEQ ID NO: 7810 - protein, 16 aa, Artificial Sequence
  source: /note="Description of Artificial Sequence: Synthetic peptide"
  MOD_RES (3)..(3): Citrulline
  MOD_RES (10)..(10): Citrulline
KTXGWHSPGXGSLDEG

SEQ ID NO: 7811 - protein, 16 aa, Artificial Sequence
  source: /note="Description of Artificial Sequence: Synthetic peptide"
  MOD_RES (6)..(6): Citrulline
WHSPGXGSLDEGYKAS

SEQ ID NO: 7812 - protein, 16 aa, Artificial Sequence
  source: /note="Description of Artificial Sequence: Synthetic peptide"
  MOD_RES (6)..(6): Citrulline
ELELHXGSSMEINLGE

SEQ ID NO: 7813 - protein, 16 aa, Artificial Sequence
  source: /note="Description of Artificial Sequence: Synthetic peptide"
  MOD_RES (2)..(2): Citrulline
HXGSSMEINLGEKDTA

SEQ ID NO: 7814 - protein, 16 aa, Artificial Sequence
  source: /note="Description of Artificial Sequence: Synthetic peptide"
  MOD_RES (13)..(13): Citrulline
LENWTEGKGLIVXGAK

SEQ ID NO: 7815 - protein, 16 aa, Artificial Sequence
  source: /note="Description of Artificial Sequence: Synthetic peptide"
  MOD_RES (9)..(9): Citrulline
TEGKGLIVXGAKNTFS

SEQ ID NO: 7816 - protein, 16 aa, Artificial Sequence
  source: /note="Description of Artificial Sequence: Synthetic peptide"
  MOD_RES (5)..(5): Citrulline
GLIVXGAKNTFSSGSD

SEQ ID NO: 7817 - protein, 16 aa, Artificial Sequence
  source: /note="Description of Artificial Sequence: Synthetic peptide"
  MOD_RES (6)..(6): Citrulline
  MOD_RES (11)..(11): Citrulline
VVEIVXGILEXGGEVN

SEQ ID NO: 7818 - protein, 16 aa, Artificial Sequence
  source: /note="Description of Artificial Sequence: Synthetic peptide"
  MOD_RES (2)..(2): Citrulline
  MOD_RES (7)..(7): Citrulline
VXGILEXGGEVNAFDN

SEQ ID NO: 7819 - protein, 16 aa, Artificial Sequence
  source: /note="Description of Artificial Sequence: Synthetic peptide"
  MOD_RES (8)..(8): Citrulline
GELLIPGXGDCLKVAP

SEQ ID NO: 7820 - protein, 16 aa, Artificial Sequence
  source: /note="Description of Artificial Sequence: Synthetic peptide"
  MOD_RES (11)..(11): Citrulline
MALVESLEYVXGEISK

SEQ ID NO: 7821 - protein, 16 aa, Artificial Sequence
  source: /note="Description of Artificial Sequence: Synthetic peptide"
  MOD_RES (7)..(7): Citrulline
ESLEYVXGEISKAMAD

SEQ ID NO: 7822 - protein, 16 aa, Artificial Sequence
  source: /note="Description of Artificial Sequence: Synthetic peptide"
  MOD_RES (3)..(3): Citrulline
YVXGEISKAMADFTTW

SEQ ID NO: 7823 - protein, 16 aa, Artificial Sequence
  source: /note="Description of Artificial Sequence: Synthetic peptide"
  MOD_RES (4)..(4): Citrulline
  MOD_RES (9)..(9): Citrulline
LPQXKLLTXGQSQGAG

SEQ ID NO: 7824 - protein, 16 aa, Artificial Sequence
  source: /note="Description of Artificial Sequence: Synthetic peptide"
  MOD_RES (5)..(5): Citrulline
KLLTXGQSQGAGEGPG

SEQ ID NO: 7825 - protein, 16 aa, Artificial Sequence
  source: /note="Description of Artificial Sequence: Synthetic peptide"
  MOD_RES (13)..(13): Citrulline
TNEDIKGSWSSKXGGE

SEQ ID NO: 7826 - protein, 16 aa, Artificial Sequence
  source: /note="Description of Artificial Sequence: Synthetic peptide"
  MOD_RES (9)..(9): Citrulline
IKGSWSSKXGGEASVN

SEQ ID NO: 7827 - protein, 16 aa, Artificial Sequence
  source: /note="Description of Artificial Sequence: Synthetic peptide"
  MOD_RES (10)..(10): Citrulline
VNITATLGNXGQALQV

SEQ ID NO: 7828 - protein, 16 aa, Artificial Sequence
  source: /note="Description of Artificial Sequence: Synthetic peptide"
  MOD_RES (6)..(6): Citrulline
ATLGNXGQALQVHAGS

SEQ ID NO: 7829 - protein, 16 aa, Artificial Sequence
  source: /note="Description of Artificial Sequence: Synthetic peptide"
  MOD_RES (6)..(6): Citrulline
  MOD_RES (12)..(12): Citrulline
GGIADXHGGLKXGDQL

SEQ ID NO: 7830 - protein, 16 aa, Artificial Sequence
  source: /note="Description of Artificial Sequence: Synthetic peptide"
  MOD_RES (13)..(13): Citrulline
LSGGCCVPKEQLXGSV

SEQ ID NO: 7831 - protein, 16 aa, Artificial Sequence
  source: /note="Description of Artificial Sequence: Synthetic peptide"
  MOD_RES (9)..(9): Citrulline
CCVPKEQLXGSVTFQN

SEQ ID NO: 7832 - protein, 16 aa, Artificial Sequence
  source: /note="Description of Artificial Sequence: Synthetic peptide"
  MOD_RES (5)..(5): Citrulline
KEQLXGSVTFQNVCFS

SEQ ID NO: 7833 - protein, 16 aa, Artificial Sequence
  source: /note="Description of Artificial Sequence: Synthetic peptide"
  MOD_RES (8)..(8): Citrulline
YNTVVGEXGTTLSGGQ

SEQ ID NO: 7834 - protein, 16 aa, Artificial Sequence
  source: /note="Description of Artificial Sequence: Synthetic peptide"
  MOD_RES (4)..(4): Citrulline
  MOD_RES (15)..(15): Citrulline
VGEXGTTLSGGQKQXL

SEQ ID NO: 7835 - protein, 16 aa, Artificial Sequence
  source: /note="Description of Artificial Sequence: Synthetic peptide"
  MOD_RES (5)..(5): Citrulline
  MOD_RES (10)..(10): Citrulline
FNGIXDYHKXGSMCNT

SEQ ID NO: 7836 - protein, 16 aa, Artificial Sequence
  source: /note="Description of Artificial Sequence: Synthetic peptide"
  MOD_RES (1)..(1): Citrulline
  MOD_RES (6)..(6): Citrulline
XDYHKXGSMCNTLFSD

SEQ ID NO: 7837 - protein, 16 aa, Artificial Sequence
  source: /note="Description of Artificial Sequence: Synthetic peptide"
  MOD_RES (10)..(10): Citrulline
  MOD_RES (16)..(16): Citrulline
PELKLAYAVXGNKLEX

SEQ ID NO: 7838 - protein, 16 aa, Artificial Sequence
  source: /note="Description of Artificial Sequence: Synthetic peptide"
  MOD_RES (6)..(6): Citrulline
  MOD_RES (12)..(12): Citrulline
LAYAVXGNKLEXGQKI

SEQ ID NO: 7839 - protein, 16 aa, Artificial Sequence
  source: /note="Description of Artificial Sequence: Synthetic peptide"
  MOD_RES (2)..(2): Citrulline
  MOD_RES (8)..(8): Citrulline
VXGNKLEXGQKISEQI

SEQ ID NO: 7840 - protein, 16 aa, Artificial Sequence
  source: /note="Description of Artificial Sequence: Synthetic peptide"
  MOD_RES (4)..(4): Citrulline
KLEXGQKISEQIVIGT

SEQ ID NO: 7841 - protein, 16 aa, Artificial Sequence
  source: /note="Description of Artificial Sequence: Synthetic peptide"
  MOD_RES (9)..(9): Citrulline
  MOD_RES (12)..(12): Citrulline
LHGGTSYGXGIXVLPE

SEQ ID NO: 7842 - protein, 16 aa, Artificial Sequence
  source: /note="Description of Artificial Sequence: Synthetic peptide"
  MOD_RES (5)..(5): Citrulline
  MOD_RES (8)..(8): Citrulline
TSYGXGIXVLPESNSD

SEQ ID NO: 7843 - protein, 16 aa, Artificial Sequence
  source: /note="Description of Artificial Sequence: Synthetic peptide"
  MOD_RES (5)..(5): Citrulline
  MOD_RES (12)..(12): Citrulline
LNSAXGAPELLXGTAT

SEQ ID NO: 7844 - protein, 16 aa, Artificial Sequence
  source: /note="Description of Artificial Sequence: Synthetic peptide"
  MOD_RES (1)..(1): Citrulline
  MOD_RES (8)..(8): Citrulline
XGAPELLXGTATNAEV

SEQ ID NO: 7845 - protein, 16 aa, Artificial Sequence
  source: /note="Description of Artificial Sequence: Synthetic peptide"
  MOD_RES (8)..(8): Citrulline
ACFPGTGXGLMSQTSL

SEQ ID NO: 7846 - protein, 16 aa, Artificial Sequence
  source: /note="Description of Artificial Sequence: Synthetic peptide"
  MOD_RES (3)..(3): Citrulline
  MOD_RES (12)..(12): Citrulline
QTXAIYDIYGKXGLEM

SEQ ID NO: 7847 - protein, 16 aa, Artificial Sequence
  source: /note="Description of Artificial Sequence: Synthetic peptide"
  MOD_RES (8)..(8): Citrulline
IYDIYGKXGLEMEGWE

SEQ ID NO: 7848 - protein, 16 aa, Artificial Sequence
  source: /note="Description of Artificial Sequence: Synthetic peptide"
  MOD_RES (7)..(7): Citrulline
  MOD_RES (14)..(14): Citrulline
AGLLAAXGLLAGGXGD

SEQ ID NO: 7849 - protein, 16 aa, Artificial Sequence
  source: /note="Description of Artificial Sequence: Synthetic peptide"
  MOD_RES (3)..(3): Citrulline
  MOD_RES (10)..(10): Citrulline
AAXGLLAGGXGDNWYS

SEQ ID NO: 7850 - protein, 16 aa, Artificial Sequence
  source: /note="Description of Artificial Sequence: Synthetic peptide"
  MOD_RES (7)..(7): Citrulline
IPVLVQXGADIDQQWG

SEQ ID NO: 7851 - protein, 16 aa, Artificial Sequence
  source: /note="Description of Artificial Sequence: Synthetic peptide"
  MOD_RES (7)..(7): Citrulline
LQQEWPXGENLFLKAV

SEQ ID NO: 7852 - protein, 16 aa, Artificial Sequence
  source: /note="Description of Artificial Sequence: Synthetic peptide"
  MOD_RES (3)..(3): Citrulline
WPXGENLFLKAVNKIC

SEQ ID NO: 7853 - protein, 16 aa, Artificial Sequence
  source: /note="Description of Artificial Sequence: Synthetic peptide"
  MOD_RES (8)..(8): Citrulline
DLSSLLTXGSGNQEQE

SEQ ID NO: 7854 - protein, 16 aa, Artificial Sequence
  source: /note="Description of Artificial Sequence: Synthetic peptide"
  MOD_RES (4)..(4): Citrulline
  MOD_RES (13)..(13): Citrulline
LLTXGSGNQEQEXQLK

SEQ ID NO: 7855 - protein, 16 aa, Artificial Sequence
  source: /note="Description of Artificial Sequence: Synthetic peptide"
  MOD_RES (7)..(7): Citrulline
  MOD_RES (16)..(16): Citrulline
GPELLSXGLFAASGTX

SEQ ID NO: 7856 - protein, 16 aa, Artificial Sequence
  source: /note="Description of Artificial Sequence: Synthetic peptide"
  MOD_RES (3)..(3): Citrulline
  MOD_RES (12)..(12): Citrulline
LSXGLFAASGTXNASQ

SEQ ID NO: 7857 - protein, 16 aa, Artificial Sequence
  source: /note="Description of Artificial Sequence: Synthetic peptide"
  MOD_RES (13)..(13): Citrulline
NPVSCPDPCSPTXGTV

SEQ ID NO: 7858 - protein, 16 aa, Artificial Sequence
  source: /note="Description of Artificial Sequence: Synthetic peptide"
  MOD_RES (9)..(9): Citrulline
CPDPCSPTXGTVSPAL

SEQ ID NO: 7859 - protein, 16 aa, Artificial Sequence
  source: /note="Description of Artificial Sequence: Synthetic peptide"
  MOD_RES (7)..(7): Citrulline
SSCQQPXGTFHLDDGE

SEQ ID NO: 7860 - protein, 16 aa, Artificial Sequence
  source: /note="Description of Artificial Sequence: Synthetic peptide"
  MOD_RES (2)..(2): Citrulline
  MOD_RES (10)..(10): Citrulline
GXEVSGHSVXGAPPGN

SEQ ID NO: 7861 - protein, 16 aa, Artificial Sequence
  source: /note="Description of Artificial Sequence: Synthetic peptide"
  MOD_RES (6)..(6): Citrulline
  MOD_RES (13)..(13): Citrulline
SGHSVXGAPPGNXSSA

SEQ ID NO: 7862 - protein, 16 aa, Artificial Sequence
  source: /note="Description of Artificial Sequence: Synthetic peptide"
  MOD_RES (2)..(2): Citrulline
  MOD_RES (9)..(9): Citrulline
VXGAPPGNXSSASGYG

SEQ ID NO: 7863 - protein, 16 aa, Artificial Sequence
  source: /note="Description of Artificial Sequence: Synthetic peptide"
  MOD_RES (12)..(12): Citrulline
YIKIEGQSKLHXGEIK

SEQ ID NO: 7864 - protein, 16 aa, Artificial Sequence
  source: /note="Description of Artificial Sequence: Synthetic peptide"
  MOD_RES (8)..(8): Citrulline
EGQSKLHXGEIKLNSE

SEQ ID NO: 7865 - protein, 16 aa, Artificial Sequence
  source: /note="Description of Artificial Sequence: Synthetic peptide"
  MOD_RES (4)..(4): Citrulline
KLHXGEIKLNSELDLD

SEQ ID NO: 7866 - protein, 16 aa, Artificial Sequence
  source: /note="Description of Artificial Sequence: Synthetic peptide"
  MOD_RES (6)..(6): Citrulline
  MOD_RES (8)..(8): Citrulline
WIHNLXSXGKLALGVL

SEQ ID NO: 7867 - protein, 16 aa, Artificial Sequence
  source: /note="Description of Artificial Sequence: Synthetic peptide"
  MOD_RES (2)..(2): Citrulline
  MOD_RES (4)..(4): Citrulline
LXSXGKLALGVLPQSY

SEQ ID NO: 7868 - protein, 16 aa, Artificial Sequence
  source: /note="Description of Artificial Sequence: Synthetic peptide"
  MOD_RES (9)..(9): Citrulline
MWYLAKLIXGMSIDQA

SEQ ID NO: 7869 - protein, 16 aa, Artificial Sequence
  source: /note="Description of Artificial Sequence: Synthetic peptide"
  MOD_RES (5)..(5): Citrulline
AKLIXGMSIDQALAQL

SEQ ID NO: 7870 - protein, 16 aa, Artificial Sequence
  source: /note="Description of Artificial Sequence: Synthetic peptide"
  MOD_RES (2)..(2): Citrulline
  MOD_RES (10)..(10): Citrulline
PXCGTYNGTXGLSCKN

SEQ ID NO: 7871 - protein, 16 aa, Artificial Sequence
  source: /note="Description of Artificial Sequence: Synthetic peptide"
  MOD_RES (9)..(9): Citrulline
  MOD_RES (13)..(13): Citrulline
IDLIEVIYXGAMXGKL

SEQ ID NO: 7872 - protein, 16 aa, Artificial Sequence
  source: /note="Description of Artificial Sequence: Synthetic peptide"
  MOD_RES (5)..(5): Citrulline
  MOD_RES (9)..(9): Citrulline
EVIYXGAMXGKLIVQS

SEQ ID NO: 7873 - protein, 16 aa, Artificial Sequence
  source: /note="Description of Artificial Sequence: Synthetic peptide"
  MOD_RES (1)..(1): Citrulline
  MOD_RES (5)..(5): Citrulline
XGAMXGKLIVQSPIDP

SEQ ID NO: 7874 - protein, 16 aa, Artificial Sequence
  source: /note="Description of Artificial Sequence: Synthetic peptide"
  MOD_RES (1)..(1): Citrulline
XGKLIVQSPIDPKNIP

SEQ ID NO: 7875 - protein, 16 aa, Artificial Sequence
  source: /note="Description of Artificial Sequence: Synthetic peptide"
  MOD_RES (7)..(7): Citrulline
  MOD_RES (10)..(10): Citrulline
LAPGAPXAAXGSVPLQ

SEQ ID NO: 7876 - protein, 16 aa, Artificial Sequence
  source: /note="Description of Artificial Sequence: Synthetic peptide"
  MOD_RES (3)..(3): Citrulline
  MOD_RES (6)..(6): Citrulline
APXAAXGSVPLQPPLP

SEQ ID NO: 7877 - protein, 16 aa, Artificial Sequence
  source: /note="Description of Artificial Sequence: Synthetic peptide"
  MOD_RES (2)..(2): Citrulline
AXGSVPLQPPLPPAAL

SEQ ID NO: 7878 - protein, 16 aa, Artificial Sequence
  source: /note="Description of Artificial Sequence: Synthetic peptide"
  MOD_RES (1)..(1): Citrulline
  MOD_RES (11)..(11): Citrulline
XLAYSEPCGLXGALLD

SEQ ID NO: 7879 - protein, 16 aa, Artificial Sequence
  source: /note="Description of Artificial Sequence: Synthetic peptide"
  MOD_RES (7)..(7): Citrulline
SEPCGLXGALLDVCVE

SEQ ID NO: 7880 - protein, 16 aa, Artificial Sequence
  source: /note="Description of Artificial Sequence: Synthetic peptide"
  MOD_RES (3)..(3): Citrulline
GLXGALLDVCVEQGKS

SEQ ID NO: 7881 - protein, 16 aa, Artificial Sequence
  source: /note="Description of Artificial Sequence: Synthetic peptide"
  MOD_RES (11)..(11): Citrulline
LQNKVSGKFKXGAQFL

SEQ ID NO: 7882 - protein, 16 aa, Artificial Sequence
  source: /note="Description of Artificial Sequence: Synthetic peptide"
  MOD_RES (7)..(7): Citrulline
VSGKFKXGAQFLTELA

SEQ ID NO: 7883 - protein, 16 aa, Artificial Sequence
  source: /note="Description of Artificial Sequence: Synthetic peptide"
  MOD_RES (3)..(3): Citrulline
FKXGAQFLTELAPLCK

SEQ ID NO: 7884 - protein, 16 aa, Artificial Sequence
  source: /note="Description of Artificial Sequence: Synthetic peptide"
  MOD_RES (11)..(11): Citrulline
VSKWMLPEKSXGTYLE

SEQ ID NO: 7885 - protein, 16 aa, Artificial Sequence
  source: /note="Description of Artificial Sequence: Synthetic peptide"
  MOD_RES (7)..(7): Citrulline
  MOD_RES (13)..(13): Citrulline
MLPEKSXGTYLEXANC

SEQ ID NO: 7886 - protein, 16 aa, Artificial Sequence
  source: /note="Description of Artificial Sequence: Synthetic peptide"
  MOD_RES (11)..(11): Citrulline
GGSPPGIDPTXGSQGA

SEQ ID NO: 7887 - protein, 16 aa, Artificial Sequence
  source: /note="Description of Artificial Sequence: Synthetic peptide"
  MOD_RES (7)..(7): Citrulline
PGIDPTXGSQGAQSSP

SEQ ID NO: 7888 - protein, 16 aa, Artificial Sequence
  source: /note="Description of Artificial Sequence: Synthetic peptide"
  MOD_RES (12)..(12): Citrulline
KAFSDIPSPYLXGTIK

SEQ ID NO: 7889 - protein, 16 aa, Artificial Sequence
  source: /note="Description of Artificial Sequence: Synthetic peptide"
  MOD_RES (8)..(8): Citrulline
DIPSPYLXGTIKMMQA

SEQ ID NO: 7890 - protein, 16 aa, Artificial Sequence
  source: /note="Description of Artificial Sequence: Synthetic peptide"
  MOD_RES (4)..(4): Citrulline
  MOD_RES (14)..(14): Citrulline
PYLXGTIKMMQAVXQA

SEQ ID NO: 7891 - protein, 16 aa, Artificial Sequence
  source: /note="Description of Artificial Sequence: Synthetic peptide"
  MOD_RES (13)..(13): Citrulline
VLYASAMTLLTEXGKL

SEQ ID NO: 7892 - protein, 15 aa, Artificial Sequence
  source: /note="Description of Artificial Sequence: Synthetic peptide"
  MOD_RES (9)..(9): Citrulline
SAMTLLTEXGKLHQP

SEQ ID NO: 7893 - protein, 16 aa, Artificial Sequence
  source: /note="Description of Artificial Sequence: Synthetic peptide"
  MOD_RES (8)..(8): Citrulline
HGGCLVTXGTKWIANN

SEQ ID NO: 7894 - protein, 16 aa, Artificial Sequence
  source: /note="Description of Artificial Sequence: Synthetic peptide"
  MOD_RES (13)..(14): Citrulline
GPSSSLNTPGSFXXGL

SEQ ID NO: 7895 - protein, 16 aa, Artificial Sequence
  source: /note="Description of Artificial Sequence: Synthetic peptide"
  MOD_RES (9)..(10): Citrulline
SLNTPGSFXXGLDDST

SEQ ID NO: 7896 - protein, 16 aa, Artificial Sequence
  source: /note="Description of Artificial Sequence: Synthetic peptide"
  MOD_RES (5)..(6): Citrulline
PGSFXXGLDDSTGGTP

SEQ ID NO: 7897 - protein, 16 aa, Artificial Sequence
  source: /note="Description of Artificial Sequence: Synthetic peptide"
  MOD_RES (10)..(10): Citrulline
  MOD_RES (13)..(13): Citrulline
KYFELEPLAXGKXWIL

SEQ ID NO: 7898 - protein, 16 aa, Artificial Sequence
  source: /note="Description of Artificial Sequence: Synthetic peptide"
  MOD_RES (6)..(6): Citrulline
  MOD_RES (9)..(9): Citrulline
LEPLAXGKXWILQPCS

SEQ ID NO: 7899 - protein, 16 aa, Artificial Sequence
  source: /note="Description of Artificial Sequence: Synthetic peptide"
  MOD_RES (5)..(5): Citrulline
  MOD_RES (14)..(14): Citrulline
GGFNXGGGGGGFNXGG

SEQ ID NO: 7900 - protein, 15 aa, Artificial Sequence
  source: /note="Description of Artificial Sequence: Synthetic peptide"
  MOD_RES (1)..(1): Citrulline
  MOD_RES (10)..(10): Citrulline
XGGGGGGFNXGGSSN

SEQ ID NO: 7901 - protein, 16 aa, Artificial Sequence
  source: /note="Description of Artificial Sequence: Synthetic peptide"
  MOD_RES (6)..(6): Citrulline
  MOD_RES (14)..(14): Citrulline
GGGFNXGGSSNHFXGG

SEQ ID NO: 7902 - protein, 15 aa, Artificial Sequence
  source: /note="Description of Artificial Sequence: Synthetic peptide"
  MOD_RES (2)..(2): Citrulline
  MOD_RES (10)..(10): Citrulline
NXGGSSNHFXGGGGG

SEQ ID NO: 7903 - protein, 16 aa, Artificial Sequence
  source: /note="Description of Artificial Sequence: Synthetic peptide"
  MOD_RES (8)..(8): Citrulline
  MOD_RES (10)..(10): Citrulline
VAGALYLXAXGKPMGF

SEQ ID NO: 7904 - protein, 16 aa, Artificial Sequence
  source: /note="Description of Artificial Sequence: Synthetic peptide"
  MOD_RES (4)..(4): Citrulline
  MOD_RES (6)..(6): Citrulline
LYLXAXGKPMGFGFSA

SEQ ID NO: 7905 - protein, 16 aa, Artificial Sequence
  source: /note="Description of Artificial Sequence: Synthetic peptide"
  MOD_RES (1)..(1): Citrulline
  MOD_RES (11)..(11): Citrulline
XNYTGTDKFLXGVEKN

SEQ ID NO: 7906 - protein, 16 aa, Artificial Sequence
  source: /note="Description of Artificial Sequence: Synthetic peptide"
  MOD_RES (7)..(7): Citrulline
GTDKFLXGVEKNVMVV

SEQ ID NO: 7907 - protein, 16 aa, Artificial Sequence
  source: /note="Description of Artificial Sequence: Synthetic peptide"
  MOD_RES (12)..(12): Citrulline
EVTSKLKSYEFXGSPF

SEQ ID NO: 7908 - protein, 16 aa, Artificial Sequence
  source: /note="Description of Artificial Sequence: Synthetic peptide"
  MOD_RES (8)..(8): Citrulline
  MOD_RES (16)..(16): Citrulline
KLKSYEFXGSPFQVTX

SEQ ID NO: 7909 - protein, 16 aa, Artificial Sequence
  source: /note="Description of Artificial Sequence: Synthetic peptide"
  MOD_RES (4)..(4): Citrulline
  MOD_RES (12)..(12): Citrulline
YEFXGSPFQVTXGDYA

SEQ ID NO: 7910 - protein, 16 aa, Artificial Sequence
  source: /note="Description of Artificial Sequence: Synthetic peptide"
  MOD_RES (8)..(8): Citrulline
GSPFQVTXGDYAPILQ

SEQ ID NO: 7911 - protein, 16 aa, Artificial Sequence
  source: /note="Description of Artificial Sequence: Synthetic peptide"
  MOD_RES (4)..(4): Citrulline
QVTXGDYAPILQKVVE

SEQ ID NO: 7912 - protein, 16 aa, Artificial Sequence
  source: /note="Description of Artificial Sequence: Synthetic peptide"
  MOD_RES (11)..(11): Citrulline
  MOD_RES (14)..(14): Citrulline
FTQGSIEAHKXGSXFW

SEQ ID NO: 7913 - protein, 16 aa, Artificial Sequence
  source: /note="Description of Artificial Sequence: Synthetic peptide"
  MOD_RES (7)..(7): Citrulline
  MOD_RES (10)..(10): Citrulline
SIEAHKXGSXFWIQDK

SEQ ID NO: 7914 - protein, 16 aa, Artificial Sequence
  source: /note="Description of Artificial Sequence: Synthetic peptide"
  MOD_RES (9)..(9): Citrulline
  MOD_RES (11)..(11): Citrulline
SKTSIFSFXGXAKDVG

SEQ ID NO: 7915 - protein, 16 aa, Artificial Sequence
  source: /note="Description of Artificial Sequence: Synthetic peptide"
  MOD_RES (5)..(5): Citrulline
  MOD_RES (7)..(7): Citrulline
IFSFXGXAKDVGSEND

SEQ ID NO: 7916 - protein, 16 aa, Artificial Sequence
  source: /note="Description of Artificial Sequence: Synthetic peptide"
  MOD_RES (8)..(8): Citrulline
EDYPEKSXGCLKKAYD

SEQ ID NO: 7917 - protein, 16 aa, Artificial Sequence
  source: /note="Description of Artificial Sequence: Synthetic peptide"
  MOD_RES (4)..(4): Citrulline
EKSXGCLKKAYDLFCG

SEQ ID NO: 7918 - protein, 16 aa, Artificial Sequence
  source: /note="Description of Artificial Sequence: Synthetic peptide"
  MOD_RES (3)..(3): Citrulline
  MOD_RES (9)..(9): Citrulline
KDXYLKHLXGQEHKYL

SEQ ID NO: 7919 - protein, 16 aa, Artificial Sequence
  source: /note="Description of Artificial Sequence: Synthetic peptide"
  MOD_RES (5)..(5): Citrulline
LKHLXGQEHKYLLGDA

SEQ ID NO: 7920 - protein, 16 aa, Artificial Sequence
  source: /note="Description of Artificial Sequence: Synthetic peptide"
  MOD_RES (1)..(1): Citrulline
XGQEHKYLLGDAPVSP

SEQ ID NO: 7921 - protein, 16 aa, Artificial Sequence
  source: /note="Description of Artificial Sequence: Synthetic peptide"
  MOD_RES (6)..(6): Citrulline
  MOD_RES (11)..(11): Citrulline
IYNQLXTITVXGMAKL

SEQ ID NO: 7922 - protein, 16 aa, Artificial Sequence
  source: /note="Description of Artificial Sequence: Synthetic peptide"
  MOD_RES (2)..(2): Citrulline
  MOD_RES (7)..(7): Citrulline
LXTITVXGMAKLLDKL

SEQ ID NO: 7923 - protein, 16 aa, Artificial Sequence
  source: /note="Description of Artificial Sequence: Synthetic peptide"
  MOD_RES (3)..(3): Citrulline
TVXGMAKLLDKLQSSY

SEQ ID NO: 7924 - protein, 16 aa, Artificial Sequence
  source: /note="Description of Artificial Sequence: Synthetic peptide"
  MOD_RES (11)..(11): Citrulline
KLGKVEFSGVXGNALS

SEQ ID NO: 7925 - protein, 16 aa, Artificial Sequence
  source: /note="Description of Artificial Sequence: Synthetic peptide"
  MOD_RES (7)..(7): Citrulline
VEFSGVXGNALSQQVQ

SEQ ID NO: 7926 - protein, 16 aa, Artificial Sequence
  source: /note="Description of Artificial Sequence: Synthetic peptide"
  MOD_RES (3)..(3): Citrulline
GVXGNALSQQVQQMHE

SEQ ID NO: 7927 - protein, 16 aa, Artificial Sequence
  source: /note="Description of Artificial Sequence: Synthetic peptide"
  MOD_RES (6)..(6): Citrulline
  MOD_RES (10)..(10): Citrulline
QELLVXGALXGAGGAG

SEQ ID NO: 7928 - protein, 16 aa, Artificial Sequence
  source: /note="Description of Artificial Sequence: Synthetic peptide"
  MOD_RES (2)..(2): Citrulline
  MOD_RES (6)..(6): Citrulline
VXGALXGAGGAGAAAP

SEQ ID NO: 7929 - protein, 16 aa, Artificial Sequence
  source: /note="Description of Artificial Sequence: Synthetic peptide"
  MOD_RES (13)..(14): Citrulline
SITPVLGSPSTKXXGQ

SEQ ID NO: 7930 - protein, 16 aa, Artificial Sequence
  source: /note="Description of Artificial Sequence: Synthetic peptide"
  MOD_RES (9)..(10): Citrulline
VLGSPSTKXXGQMLQP

SEQ ID NO: 7931 - protein, 16 aa, Artificial Sequence
  source: /note="Description of Artificial Sequence: Synthetic peptide"
  MOD_RES (5)..(6): Citrulline
PSTKXXGQMLQPIIEG

SEQ ID NO: 7932 - protein, 16 aa, Artificial Sequence
  source: /note="Description of Artificial Sequence: Synthetic peptide"
  MOD_RES (9)..(9): Citrulline
  MOD_RES (11)..(11): Citrulline
SISLNSSPXGXYSGKS

SEQ ID NO: 7933 - protein, 16 aa, Artificial Sequence
  source: /note="Description of Artificial Sequence: Synthetic peptide"
  MOD_RES (5)..(5): Citrulline
  MOD_RES (7)..(7): Citrulline
NSSPXGXYSGKSQHST

SEQ ID NO: 7934 - protein, 16 aa, Artificial Sequence
  source: /note="Description of Artificial Sequence: Synthetic peptide"
  MOD_RES (10)..(10): Citrulline
IPSHLAYGKXGFPPSV

SEQ ID NO: 7935 - protein, 16 aa, Artificial Sequence
  source: /note="Description of Artificial Sequence: Synthetic peptide"
  MOD_RES (6)..(6): Citrulline
LAYGKXGFPPSVPADA

SEQ ID NO: 7936 - protein, 16 aa, Artificial Sequence
  source: /note="Description of Artificial Sequence: Synthetic peptide"
  MOD_RES (6)..(6): Citrulline
  MOD_RES (16)..(16): Citrulline
SPVAFXGATMQMLKAX

SEQ ID NO: 7937 - protein, 16 aa, Artificial Sequence
  source: /note="Description of Artificial Sequence: Synthetic peptide"
  MOD_RES (7)..(7): Citrulline
LLPGGVXGQFFPSEDL

SEQ ID NO: 7938 - protein, 16 aa, Artificial Sequence
  source: /note="Description of Artificial Sequence: Synthetic peptide"
  MOD_RES (3)..(3): Citrulline
GVXGQFFPSEDLQEQI

SEQ ID NO: 7939 - protein, 16 aa, Artificial Sequence
  source: /note="Description of Artificial Sequence: Synthetic peptide"
  MOD_RES (7)..(7): Citrulline
EKWDPAXGAVHSTPKG

SEQ ID NO: 7940 - protein, 16 aa, Artificial Sequence
  source: /note="Description of Artificial Sequence: Synthetic peptide"
  MOD_RES (3)..(3): Citrulline
PAXGAVHSTPKGDAVA

SEQ ID NO: 7941 - protein, 16 aa, Artificial Sequence
  source: /note="Description of Artificial Sequence: Synthetic peptide"
  MOD_RES (8)..(8): Citrulline
  MOD_RES (14)..(14): Citrulline
PEVSSCGXTGPLQXGS

SEQ ID NO: 7942 - protein, 16 aa, Artificial Sequence
  source: /note="Description of Artificial Sequence: Synthetic peptide"
  MOD_RES (4)..(4): Citrulline
  MOD_RES (10)..(10): Citrulline
SCGXTGPLQXGSLSPG

SEQ ID NO: 7943 - protein, 16 aa, Artificial Sequence
  source: /note="Description of Artificial Sequence: Synthetic peptide"
  MOD_RES (6)..(6): Citrulline
TGPLQXGSLSPGALSS

SEQ ID NO: 7944 - protein, 16 aa, Artificial Sequence
  source: /note="Description of Artificial Sequence: Synthetic peptide"
  MOD_RES (2)..(2): Citrulline
QXGSLSPGALSSGVPG

SEQ ID NO: 7945 - protein, 16 aa, Artificial Sequence
  source: /note="Description of Artificial Sequence: Synthetic peptide"
  MOD_RES (2)..(2): Citrulline
  MOD_RES (12)..(12): Citrulline
NXLQYPLVPQTXGAPE

SEQ ID NO: 7946 - protein, 16 aa, Artificial Sequence
  source: /note="Description of Artificial Sequence: Synthetic peptide"
  MOD_RES (8)..(8): Citrulline
YPLVPQTXGAPELSWC

SEQ ID NO: 7947 - protein, 16 aa, Artificial Sequence
  source: /note="Description of Artificial Sequence: Synthetic peptide"
  MOD_RES (11)..(11): Citrulline
EKISSYQLKIXGSNMA

SEQ ID NO: 7948 - protein, 16 aa, Artificial Sequence
  source: /note="Description of Artificial Sequence: Synthetic peptide"
  MOD_RES (7)..(7): Citrulline
SYQLKIXGSNMAGAFT

SEQ ID NO: 7949 - protein, 16 aa, Artificial Sequence
  source: /note="Description of Artificial Sequence: Synthetic peptide"
  MOD_RES (12)..(12): Citrulline
HMVQSAGVLQTXGVAF

SEQ ID NO: 7950 - protein, 16 aa, Artificial Sequence
  source: /note="Description of Artificial Sequence: Synthetic peptide"
  MOD_RES (8)..(8): Citrulline
  MOD_RES (14)..(14): Citrulline
SAGVLQTXGVAFDXEQ

SEQ ID NO: 7951 - protein, 16 aa, Artificial Sequence
  source: /note="Description of Artificial Sequence: Synthetic peptide"
  MOD_RES (1)..(1): Citrulline
  MOD_RES (9)..(9): Citrulline
XPVGGFSLXGSLVSAL

SEQ ID NO: 7952 - protein, 16 aa, Artificial Sequence
  source: /note="Description of Artificial Sequence: Synthetic peptide"
  MOD_RES (5)..(5): Citrulline
GFSLXGSLVSALEDNG

SEQ ID NO: 7953 - protein, 16 aa, Artificial Sequence
  source: /note="Description of Artificial Sequence: Synthetic peptide"
  MOD_RES (1)..(1): Citrulline
XGSLVSALEDNGVPTG

SEQ ID NO: 7954 - protein, 16 aa, Artificial Sequence
  source: /note="Description of Artificial Sequence: Synthetic peptide"
  MOD_RES (5)..(5): Citrulline
  MOD_RES (7)..(7): Citrulline
AAGDXLXGQYQGLSQD

SEQ ID NO: 7955 - protein, 16 aa, Artificial Sequence
  source: /note="Description of Artificial Sequence: Synthetic peptide"
  MOD_RES (1)..(1): Citrulline
  MOD_RES (3)..(3): Citrulline
XLXGQYQGLSQDPNSL

SEQ ID NO: 7956 - protein, 16 aa, Artificial Sequence
  source: /note="Description of Artificial Sequence: Synthetic peptide"
  MOD_RES (3)..(3): Citrulline
  MOD_RES (10)..(10): Citrulline
EIXNGFSEIXGSVQAK

SEQ ID NO: 7957 - protein, 16 aa, Artificial Sequence
  source: /note="Description of Artificial Sequence: Synthetic peptide"
  MOD_RES (6)..(6): Citrulline
GFSEIXGSVQAKDGNI

SEQ ID NO: 7958 - protein, 16 aa, Artificial Sequence
  source: /note="Description of Artificial Sequence: Synthetic peptide"
  MOD_RES (2)..(2): Citrulline
  MOD_RES (15)..(15): Citrulline
IXGSVQAKDGNIDIXI

SEQ ID NO: 7959 - protein, 16 aa, Artificial Sequence
  source: /note="Description of Artificial Sequence: Synthetic peptide"
  MOD_RES (6)..(6): Citrulline
  MOD_RES (10)..(10): Citrulline
IGDAIXMIVXGTLGSC

SEQ ID NO: 7960 - protein, 16 aa, Artificial Sequence
  source: /note="Description of Artificial Sequence: Synthetic peptide"
  MOD_RES (4)..(4): Citrulline
  MOD_RES (9)..(9): Citrulline
PPAXLSWTXGSLTLCP

SEQ ID NO: 7961 - protein, 16 aa, Artificial Sequence
  source: /note="Description of Artificial Sequence: Synthetic peptide"
  MOD_RES (5)..(5): Citrulline
  MOD_RES (14)..(14): Citrulline
LSWTXGSLTLCPSXSS

SEQ ID NO: 7962 - protein, 16 aa, Artificial Sequence
  source: /note="Description of Artificial Sequence: Synthetic peptide"
  MOD_RES (8)..(8): Citrulline
MNGGNKTXGQADGFGL

SEQ ID NO: 7963 - protein, 16 aa, Artificial Sequence
  source: /note="Description of Artificial Sequence: Synthetic peptide"
  MOD_RES (4)..(4): Citrulline
NKTXGQADGFGLDILP

SEQ ID NO: 7964 - protein, 16 aa, Artificial Sequence
  source: /note="Description of Artificial Sequence: Synthetic peptide"
  MOD_RES (8)..(8): Citrulline
  MOD_RES (10)..(10): Citrulline
PVPPSQGXGXGFAGVC

SEQ ID NO: 7965 - protein, 16 aa, Artificial Sequence
  source: /note="Description of Artificial Sequence: Synthetic peptide"
  MOD_RES (4)..(4): Citrulline
  MOD_RES (6)..(6): Citrulline
SQGXGXGFAGVCGFGG

SEQ ID NO: 7966 - protein, 16 aa, Artificial Sequence
  source: /note="Description of Artificial Sequence: Synthetic peptide"
  MOD_RES (10)..(10): Citrulline
TEYVTLIMTXGMMFVN

SEQ ID NO: 7967 - protein, 16 aa, Artificial Sequence
  source: /note="Description of Artificial Sequence: Synthetic peptide"
  MOD_RES (6)..(6): Citrulline
TLIMTXGMMFVNMTPC

SEQ ID NO: 7968 - protein, 16 aa, Artificial Sequence
  source: /note="Description of Artificial Sequence: Synthetic peptide"
  MOD_RES (2)..(2): Citrulline
TXGMMFVNMTPCQLNV

SEQ ID NO: 7969 - protein, 16 aa, Artificial Sequence
  source: /note="Description of Artificial Sequence: Synthetic peptide"
  MOD_RES (6)..(6): Citrulline
  MOD_RES (10)..(10): Citrulline
GGFGSXGQPXQGSPVA

SEQ ID NO: 7970 - protein, 16 aa, Artificial Sequence
  source: /note="Description of Artificial Sequence: Synthetic peptide"
  MOD_RES (2)..(2): Citrulline
  MOD_RES (6)..(6): Citrulline
SXGQPXQGSPVAAGAP

SEQ ID NO: 7971 - protein, 16 aa, Artificial Sequence
  source: /note="Description of Artificial Sequence: Synthetic peptide"
  MOD_RES (4)..(4): Citrulline
  MOD_RES (11)..(11): Citrulline
NITXLGESLKXGEVDK

SEQ ID NO: 7972 - protein, 16 aa, Artificial Sequence
  source: /note="Description of Artificial Sequence: Synthetic peptide"
  MOD_RES (7)..(7): Citrulline
LGESLKXGEVDKVGKF

SEQ ID NO: 7973 - protein, 16 aa, Artificial Sequence
  source: /note="Description of Artificial Sequence: Synthetic peptide"
  MOD_RES (3)..(3): Citrulline
LKXGEVDKVGKFGLGF

SEQ ID NO: 7974 - protein, 16 aa, Artificial Sequence
  source: /note="Description of Artificial Sequence: Synthetic peptide"
  MOD_RES (13)..(13): Citrulline
TKLALIAADYAVXGKS

SEQ ID NO: 7975 - protein, 16 aa, Artificial Sequence
  source: /note="Description of Artificial Sequence: Synthetic peptide"
  MOD_RES (9)..(9): Citrulline
LIAADYAVXGKSDKDV

SEQ ID NO: 7976 - protein, 16 aa, Artificial Sequence
  source: /note="Description of Artificial Sequence: Synthetic peptide"
  MOD_RES (5)..(5): Citrulline
APWAXGGAAGMAGAGA

SEQ ID NO: 7977 - protein, 16 aa, Artificial Sequence
  source: /note="Description of Artificial Sequence: Synthetic peptide"
  MOD_RES (3)..(3): Citrulline
  MOD_RES (14)..(14): Citrulline
SPXLMSNALSTVTXGS

SEQ ID NO: 7978 - protein, 16 aa, Artificial Sequence
  source: /note="Description of Artificial Sequence: Synthetic peptide"
  MOD_RES (10)..(10): Citrulline
MSNALSTVTXGSMKKV

SEQ ID NO: 7979 - protein, 16 aa, Artificial Sequence
  source: /note="Description of Artificial Sequence: Synthetic peptide"
  MOD_RES (6)..(6): Citrulline
LSTVTXGSMKKVFPPD

SEQ ID NO: 7980 - protein, 16 aa, Artificial Sequence
  source: /note="Description of Artificial Sequence: Synthetic peptide"
  MOD_RES (2)..(2): Citrulline
TXGSMKKVFPPDEIEQ

SEQ ID NO: 7981 - protein, 16 aa, Artificial Sequence
  source: /note="Description of Artificial Sequence: Synthetic peptide"
  MOD_RES (8)..(8): Citrulline
ELVPPSFXGGKQIDSI

SEQ ID NO: 7982 - protein, 16 aa, Artificial Sequence
  source: /note="Description of Artificial Sequence: Synthetic peptide"
  MOD_RES (4)..(4): Citrulline
PSFXGGKQIDSINGTL

SEQ ID NO: 7983 - protein, 16 aa, Artificial Sequence
  source: /note="Description of Artificial Sequence: Synthetic peptide"
  MOD_RES (13)..(13): Citrulline
PTMSLHTPPSPSXGIL

SEQ ID NO: 7984 - protein, 16 aa, Artificial Sequence
  source: /note="Description of Artificial Sequence: Synthetic peptide"
  MOD_RES (9)..(9): Citrulline
LHTPPSPSXGILPMNP

SEQ ID NO: 7985 - protein, 16 aa, Artificial Sequence
  source: /note="Description of Artificial Sequence: Synthetic peptide"
  MOD_RES (11)..(11): Citrulline
LWGVLQACPTXGSVLL

SEQ ID NO: 7986 - protein, 16 aa, Artificial Sequence
  source: /note="Description of Artificial Sequence: Synthetic peptide"
  MOD_RES (7)..(7): Citrulline
LQACPTXGSVLLAQEL

SEQ ID NO: 7987 - protein, 16 aa, Artificial Sequence
  source: /note="Description of Artificial Sequence: Synthetic peptide"
  MOD_RES (3)..(3): Citrulline
PTXGSVLLAQELPQQL

SEQ ID NO: 7988 - protein, 16 aa, Artificial Sequence
  source: /note="Description of Artificial Sequence: Synthetic peptide"
  MOD_RES (3)..(3): Citrulline
  MOD_RES (8)..(8): Citrulline
KGXPGIVXGMDLNTKI

SEQ ID NO: 7989 - protein, 16 aa, Artificial Sequence
  source: /note="Description of Artificial Sequence: Synthetic peptide"
  MOD_RES (4)..(4): Citrulline
GIVXGMDLNTKIADEY

SEQ ID NO: 7990 - protein, 16 aa, Artificial Sequence
  source: /note="Description of Artificial Sequence: Synthetic peptide"
  MOD_RES (7)..(7): Citrulline
  MOD_RES (10)..(10): Citrulline
TDVVEDXIYXGKLSES

SEQ ID NO: 7991 - protein, 16 aa, Artificial Sequence
  source: /note="Description of Artificial Sequence: Synthetic peptide"
  MOD_RES (6)..(6): Citrulline
VHEGIXGIPLEPSDKM

SEQ ID NO: 7992 - protein, 16 aa, Artificial Sequence
  source: /note="Description of Artificial Sequence: Synthetic peptide"
  MOD_RES (2)..(2): Citrulline
IXGIPLEPSDKMDALM

SEQ ID NO: 7993 - protein, 16 aa, Artificial Sequence
  source: /note="Description of Artificial Sequence: Synthetic peptide"
  MOD_RES (11)..(11): Citrulline
GPGLDGSSLAXGALPL

SEQ ID NO: 7994 - protein, 16 aa, Artificial Sequence
  source: /note="Description of Artificial Sequence: Synthetic peptide"
  MOD_RES (7)..(7): Citrulline
DGSSLAXGALPLGLGL

SEQ ID NO: 7995 - protein, 16 aa, Artificial Sequence
  source: /note="Description of Artificial Sequence: Synthetic peptide"
  MOD_RES (2)..(2): Citrulline
  MOD_RES (13)..(13): Citrulline
VXGLMCQAPEKVXGMA

SEQ ID NO: 7996 - protein, 16 aa, Artificial Sequence
  source: /note="Description of Artificial Sequence: Synthetic peptide"
  MOD_RES (9)..(9): Citrulline
MCQAPEKVXGMAIKDL

SEQ ID NO: 7997 - protein, 16 aa, Artificial Sequence
  source: /note="Description of Artificial Sequence: Synthetic peptide"
  MOD_RES (5)..(5): Citrulline
  MOD_RES (16)..(16): Citrulline
VVNVXGLMCQGPEKVX

SEQ ID NO: 7998 - protein, 16 aa, Artificial Sequence
  source: /note="Description of Artificial Sequence: Synthetic peptide"
  MOD_RES (1)..(1): Citrulline
  MOD_RES (12)..(12): Citrulline
XGLMCQGPEKVXGMAI

SEQ ID NO: 7999 - protein, 16 aa, Artificial Sequence
  source: /note="Description of Artificial Sequence: Synthetic peptide"
  MOD_RES (8)..(8): Citrulline
CQGPEKVXGMAIKDIT

SEQ ID NO: 8000 - protein, 16 aa, Artificial Sequence
  source: /note="Description of Artificial Sequence: Synthetic peptide"
  MOD_RES (11)..(11): Citrulline
  MOD_RES (14)..(14): Citrulline
ATHTIGYGTTXGYXDG

SEQ ID NO: 8001 - protein, 16 aa, Artificial Sequence
  source: /note="Description of Artificial Sequence: Synthetic peptide"
  MOD_RES (7)..(7): Citrulline
  MOD_RES (10)..(10): Citrulline
IGYGTTXGYXDGGIPD

SEQ ID NO: 8002 - protein, 16 aa, Artificial Sequence
  source: /note="Description of Artificial Sequence: Synthetic peptide"
  MOD_RES (3)..(3): Citrulline
  MOD_RES (6)..(6): Citrulline
TTXGYXDGGIPDIDYS

SEQ ID NO: 8003 - protein, 16 aa, Artificial Sequence
  source: /note="Description of Artificial Sequence: Synthetic peptide"
  MOD_RES (12)..(13): Citrulline
ATYMQFLKEGLXXGLP

SEQ ID NO: 8004 - protein, 16 aa, Artificial Sequence
  source: /note="Description of Artificial Sequence: Synthetic peptide"
  MOD_RES (8)..(9): Citrulline
QFLKEGLXXGLPLLQP

SEQ ID NO: 8005 - protein, 12 aa, Artificial Sequence
  source: /note="Description of Artificial Sequence: Synthetic peptide"
  MOD_RES (4)..(5): Citrulline
EGLXXGLPLLQP

SEQ ID NO: 8006 - protein, 16 aa, Artificial Sequence
  source: /note="Description of Artificial Sequence: Synthetic peptide"
  MOD_RES (8)..(8): Citrulline
DPTEIHNXGQLKSHMK

SEQ ID NO: 8007 - protein, 16 aa, Artificial Sequence
  source: /note="Description of Artificial Sequence: Synthetic peptide"
  MOD_RES (4)..(4): Citrulline
IHNXGQLKSHMKEAMI

SEQ ID NO: 8008 - protein, 16 aa, Artificial Sequence
  source: /note="Description of Artificial Sequence: Synthetic peptide"
  MOD_RES (11)..(11): Citrulline
  MOD_RES (14)..(14): Citrulline
EIYGECGVCPXGQXTN

SEQ ID NO: 8009 - protein, 16 aa, Artificial Sequence
  source: /note="Description of Artificial Sequence: Synthetic peptide"
  MOD_RES (7)..(7): Citrulline
  MOD_RES (10)..(10): Citrulline
ECGVCPXGQXTNAQKY

SEQ ID NO: 8010 - protein, 16 aa, Artificial Sequence
  source: /note="Description of Artificial Sequence: Synthetic peptide"
  MOD_RES (8)..(8): Citrulline
AATCLQTXGMLLGVFD

SEQ ID NO: 8011 - protein, 16 aa, Artificial Sequence
  source: /note="Description of Artificial Sequence: Synthetic peptide"
  MOD_RES (4)..(4): Citrulline
LQTXGMLLGVFDGHAG

SEQ ID NO: 8012 - protein, 16 aa, Artificial Sequence
  source: /note="Description of Artificial Sequence: Synthetic peptide"
  MOD_RES (10)..(10): Citrulline
GQAPPHLLAXGAKWGQ

SEQ ID NO: 8013 - protein, 16 aa, Artificial Sequence
  source: /note="Description of Artificial Sequence: Synthetic peptide"
  MOD_RES (6)..(6): Citrulline
PHLLAXGAKWGQALPV

SEQ ID NO: 8014 - protein, 16 aa, Artificial Sequence
  source: /note="Description of Artificial Sequence: Synthetic peptide"
  MOD_RES (4)..(4): Citrulline
  MOD_RES (8)..(8): Citrulline
NLPXTVIXGSQAELKC

SEQ ID NO: 8015 - protein, 16 aa, Artificial Sequence
  source: /note="Description of Artificial Sequence: Synthetic peptide"
  MOD_RES (4)..(4): Citrulline
TVIXGSQAELKCPVCL

SEQ ID NO: 8016 - protein, 16 aa, Artificial Sequence
  source: /note="Description of Artificial Sequence: Synthetic peptide"
  MOD_RES (10)..(10): Citrulline
GTGVGAMLAXGSASPH

SEQ ID NO: 8017 - protein, 16 aa, Artificial Sequence
  source: /note="Description of Artificial Sequence: Synthetic peptide"
  MOD_RES (6)..(6): Citrulline
GAMLAXGSASPHKSSP

SEQ ID NO: 8018 - protein, 16 aa, Artificial Sequence
  source: /note="Description of Artificial Sequence: Synthetic peptide"
  MOD_RES (2)..(2): Citrulline
AXGSASPHKSSPQPLV

SEQ ID NO: 8019 - protein, 16 aa, Artificial Sequence
  source: /note="Description of Artificial Sequence: Synthetic peptide"
  MOD_RES (2)..(2): Citrulline
  MOD_RES (12)..(12): Citrulline
LXGIVDSKYFNXGIMM

SEQ ID NO: 8020 - protein, 16 aa, Artificial Sequence
  source: /note="Description of Artificial Sequence: Synthetic peptide"
  MOD_RES (10)..(10): Citrulline
SPKPLSTTPXGQSFLL

SEQ ID NO: 8021 - protein, 16 aa, Artificial Sequence
  source: /note="Description of Artificial Sequence: Synthetic peptide"
  MOD_RES (6)..(6): Citrulline
  MOD_RES (14)..(14): Citrulline
LSTTPXGQSFLLSXQA

SEQ ID NO: 8022 - protein, 16 aa, Artificial Sequence
  source: /note="Description of Artificial Sequence: Synthetic peptide"
  MOD_RES (8)..(8): Citrulline
  MOD_RES (11)..(11): Citrulline
VQDFCASXLPXGCPLS

SEQ ID NO: 8023 - protein, 16 aa, Artificial Sequence
  source: /note="Description of Artificial Sequence: Synthetic peptide"
  MOD_RES (4)..(4): Citrulline
  MOD_RES (7)..(7): Citrulline
CASXLPXGCPLSLEDL

SEQ ID NO: 8024 - protein, 16 aa, Artificial Sequence
  source: /note="Description of Artificial Sequence: Synthetic peptide"
  MOD_RES (3)..(3): Citrulline
  MOD_RES (10)..(10): Citrulline
FQXNSGSLSXGEEGFK

SEQ ID NO: 8025 - protein, 16 aa, Artificial Sequence
  source: /note="Description of Artificial Sequence: Synthetic peptide"
  MOD_RES (11)..(11): Citrulline
  MOD_RES (14)..(14): Citrulline
KEESEKPLIEXGSXKW

SEQ ID NO: 8026 - protein, 16 aa, Artificial Sequence
  source: /note="Description of Artificial Sequence: Synthetic peptide"
  MOD_RES (7)..(7): Citrulline
  MOD_RES (10)..(10): Citrulline
EKPLIEXGSXKWPGIK

SEQ ID NO: 8027 - protein, 16 aa, Artificial Sequence
  source: /note="Description of Artificial Sequence: Synthetic peptide"
  MOD_RES (1)..(1): Citrulline
  MOD_RES (9)..(9): Citrulline
XTGAVPKQXGMLILNG

SEQ ID NO: 8028 - protein, 16 aa, Artificial Sequence
  source: /note="Description of Artificial Sequence: Synthetic peptide"
  MOD_RES (5)..(5): Citrulline
  MOD_RES (14)..(14): Citrulline
VPKQXGMLILNGFXGH

SEQ ID NO: 8029 - protein, 16 aa, Artificial Sequence
  source: /note="Description of Artificial Sequence: Synthetic peptide"
  MOD_RES (6)..(6): Citrulline
QAHHPXGSPGAAGGGA

SEQ ID NO: 8030 - protein, 16 aa, Artificial Sequence
  source: /note="Description of Artificial Sequence: Synthetic peptide"
  MOD_RES (6)..(6): Citrulline
SSFQYXGGPGAGAAGG

SEQ ID NO: 8031 - protein, 16 aa, Artificial Sequence
  source: /note="Description of Artificial Sequence: Synthetic peptide"
  MOD_RES (8)..(8): Citrulline
EKAYASIXGVAMEPSA

SEQ ID NO: 8032 - protein, 16 aa, Artificial Sequence
  source: /note="Description of Artificial Sequence: Synthetic peptide"
  MOD_RES (4)..(4): Citrulline
ASIXGVAMEPSAFGGT

SEQ ID NO: 8033 - protein, 16 aa, Artificial Sequence
  source: /note="Description of Artificial Sequence: Synthetic peptide"
  MOD_RES (8)..(8): Citrulline
LPGPPGPXGFQGMAGA

SEQ ID NO: 8034 - protein, 16 aa, Artificial Sequence
  source: /note="Description of Artificial Sequence: Synthetic peptide"
  MOD_RES (4)..(4): Citrulline
  MOD_RES (13)..(13): Citrulline
PGPXGFQGMAGAXGTS

SEQ ID NO: 8035 - protein, 16 aa, Artificial Sequence
  source: /note="Description of Artificial Sequence: Synthetic peptide"
  MOD_RES (2)..(2): Citrulline
  MOD_RES (9)..(9): Citrulline
GXALEDCSXGSVSKSS

SEQ ID NO: 8036 - protein, 16 aa, Artificial Sequence
  source: /note="Description of Artificial Sequence: Synthetic peptide"
  MOD_RES (5)..(5): Citrulline
EDCSXGSVSKSSPASP

SEQ ID NO: 8037 - protein, 16 aa, Artificial Sequence
  source: /note="Description of Artificial Sequence: Synthetic peptide"
  MOD_RES (7)..(7): Citrulline
  MOD_RES (10)..(10): Citrulline
KNLHTLXAVXGGILDV

SEQ ID NO: 8038 - protein, 16 aa, Artificial Sequence
  source: /note="Description of Artificial Sequence: Synthetic peptide"
  MOD_RES (3)..(3): Citrulline
  MOD_RES (6)..(6): Citrulline
TLXAVXGGILDVKNTC

SEQ ID NO: 8039 - protein, 16 aa, Artificial Sequence
  source: /note="Description of Artificial Sequence: Synthetic peptide"
  MOD_RES (2)..(2): Citrulline
VXGGILDVKNTCWHED

SEQ ID NO: 8040 - protein, 16 aa, Artificial Sequence
  source: /note="Description of Artificial Sequence: Synthetic peptide"
  MOD_RES (1)..(1): Citrulline
  MOD_RES (13)..(13): Citrulline
XSGAMTPDHWIKXGTA

SEQ ID NO: 8041 - protein, 16 aa, Artificial Sequence
  source: /note="Description of Artificial Sequence: Synthetic peptide"
  MOD_RES (9)..(9): Citrulline
MTPDHWIKXGTALLMS

SEQ ID NO: 8042 - protein, 15 aa, Artificial Sequence
  source: /note="Description of Artificial Sequence: Synthetic peptide"
  MOD_RES (5)..(5): Citrulline
HWIKXGTALLMSLDS

SEQ ID NO: 8043 - protein, 16 aa, Artificial Sequence
  source: /note="Description of Artificial Sequence: Synthetic peptide"
  MOD_RES (8)..(8): Citrulline
  MOD_RES (11)..(11): Citrulline
FLKQSAAXGLXTQDLP

SEQ ID NO: 8044 - protein, 16 aa, Artificial Sequence
  source: /note="Description of Artificial Sequence: Synthetic peptide"
  MOD_RES (9)..(9): Citrulline
  MOD_RES (11)..(11): Citrulline
VAGNETSAXLXGLKSN

SEQ ID NO: 8045 - protein, 16 aa, Artificial Sequence
  source: /note="Description of Artificial Sequence: Synthetic peptide"
  MOD_RES (5)..(5): Citrulline
  MOD_RES (7)..(7): Citrulline
ETSAXLXGLKSNLAYY

SEQ ID NO: 8046 - protein, 16 aa, Artificial Sequence
  source: /note="Description of Artificial Sequence: Synthetic peptide"
  MOD_RES (12)..(12): Citrulline
GLGNQVEVLKTXGINL

SEQ ID NO: 8047 - protein, 16 aa, Artificial Sequence
  source: /note="Description of Artificial Sequence: Synthetic peptide"
  MOD_RES (8)..(8): Citrulline
  MOD_RES (16)..(16): Citrulline
QVEVLKTXGINLSCVX

SEQ ID NO: 8048 - protein, 16 aa, Artificial Sequence
  source: /note="Description of Artificial Sequence: Synthetic peptide"
  MOD_RES (3)..(3): Citrulline
  MOD_RES (10)..(10): Citrulline
VAXGQWPDVXGSQHGH

SEQ ID NO: 8049 - protein, 16 aa, Artificial Sequence
  source: /note="Description of Artificial Sequence: Synthetic peptide"
  MOD_RES (6)..(6): Citrulline
  MOD_RES (15)..(15): Citrulline
QWPDVXGSQHGHTGXQ

SEQ ID NO: 8050 - protein, 16 aa, Artificial Sequence
  source: /note="Description of Artificial Sequence: Synthetic peptide"
  MOD_RES (2)..(2): Citrulline
  MOD_RES (11)..(11): Citrulline
VXGSQHGHTGXQVSSP

SEQ ID NO: 8051 - protein, 16 aa, Artificial Sequence
  source: /note="Description of Artificial Sequence: Synthetic peptide"
  MOD_RES (9)..(9): Citrulline
PSSGAASPXGFPLGLS

SEQ ID NO: 8052 - protein, 16 aa, Artificial Sequence
  source: /note="Description of Artificial Sequence: Synthetic peptide"
  MOD_RES (5)..(5): Citrulline
AASPXGFPLGLSAKSG

SEQ ID NO: 8053 - protein, 16 aa, Artificial Sequence
  source: /note="Description of Artificial Sequence: Synthetic peptide"
  MOD_RES (10)..(11): Citrulline
SSGSSCNSTXXGTFSD

SEQ ID NO: 8054 - protein, 16 aa, Artificial Sequence
  source: /note="Description of Artificial Sequence: Synthetic peptide"
  MOD_RES (6)..(7): Citrulline
SCNSTXXGTFSDQELD

SEQ ID NO: 8055 - protein, 16 aa, Artificial Sequence
  source: /note="Description of Artificial Sequence: Synthetic peptide"
  MOD_RES (2)..(3): Citrulline
TXXGTFSDQELDAQSL

SEQ ID NO: 8056 - protein, 16 aa, Artificial Sequence
  source: /note="Description of Artificial Sequence: Synthetic peptide"
  MOD_RES (8)..(8): Citrulline
KSLASVIXGQVLTADG

SEQ ID NO: 8057 - protein, 16 aa, Artificial Sequence
  source: /note="Description of Artificial Sequence: Synthetic peptide"
  MOD_RES (4)..(4): Citrulline
SVIXGQVLTADGTPLI

SEQ ID NO: 8058 - protein, 16 aa, Artificial Sequence
  source: /note="Description of Artificial Sequence: Synthetic peptide"
  MOD_RES (14)..(14): Citrulline
VTYSSTGQIASIQXGT

SEQ ID NO: 8059 - protein, 16 aa, Artificial Sequence
  source: /note="Description of Artificial Sequence: Synthetic peptide"
  MOD_RES (10)..(10): Citrulline
STGQIASIQXGTTSEK

SEQ ID NO: 8060 - protein, 16 aa, Artificial Sequence
  source: /note="Description of Artificial Sequence: Synthetic peptide"
  MOD_RES (6)..(6): Citrulline
IASIQXGTTSEKVDYD

SEQ ID NO: 8061 - protein, 16 aa, Artificial Sequence
  source: /note="Description of Artificial Sequence: Synthetic peptide"
  MOD_RES (9)..(9): Citrulline
LLQKLFNKXGSSGSSA

SEQ ID NO: 8062 - protein, 16 aa, Artificial Sequence
  source: /note="Description of Artificial Sequence: Synthetic peptide"
  MOD_RES (5)..(5): Citrulline
LFNKXGSSGSSAAASA

SEQ ID NO: 8063 - protein, 16 aa, Artificial Sequence
  source: /note="Description of Artificial Sequence: Synthetic peptide"
  MOD_RES (8)..(9): Citrulline
PATTWPVXXGKFNFPY

SEQ ID NO: 8064 - protein, 16 aa, Artificial Sequence
  source: /note="Description of Artificial Sequence: Synthetic peptide"
  MOD_RES (4)..(5): Citrulline
WPVXXGKFNFPYKIDD

SEQ ID NO: 8065 - protein, 16 aa, Artificial Sequence
  source: /note="Description of Artificial Sequence: Synthetic peptide"
  MOD_RES (7)..(7): Citrulline
  MOD_RES (9)..(9): Citrulline
AVSSSSXAXGGALSAL

SEQ ID NO: 8066 - protein, 16 aa, Artificial Sequence
  source: /note="Description of Artificial Sequence: Synthetic peptide"
  MOD_RES (3)..(3): Citrulline
  MOD_RES (5)..(5): Citrulline
SSXAXGGALSALGPSP

SEQ ID NO: 8067 - protein, 16 aa, Artificial Sequence
  source: /note="Description of Artificial Sequence: Synthetic peptide"
  MOD_RES (11)..(11): Citrulline
QQPDPQCWEKXGGAGG

SEQ ID NO: 8068 - protein, 16 aa, Artificial Sequence
  source: /note="Description of Artificial Sequence: Synthetic peptide"
  MOD_RES (7)..(7): Citrulline
PQCWEKXGGAGGDTKG

SEQ ID NO: 8069 - protein, 16 aa, Artificial Sequence
  source: /note="Description of Artificial Sequence: Synthetic peptide"
  MOD_RES (15)..(15): Citrulline
GHPQHMQQMGSYMAXG

SEQ ID NO: 8070 - protein, 16 aa, Artificial Sequence
  source: /note="Description of Artificial Sequence: Synthetic peptide"
  MOD_RES (11)..(11): Citrulline
HMQQMGSYMAXGDFSM

SEQ ID NO: 8071 - protein, 16 aa, Artificial Sequence
  source: /note="Description of Artificial Sequence: Synthetic peptide"
  MOD_RES (7)..(7): Citrulline
MGSYMAXGDFSMQQHG

SEQ ID NO: 8072 - protein, 16 aa, Artificial Sequence
  source: /note="Description of Artificial Sequence: Synthetic peptide"
  MOD_RES (8)..(8): Citrulline
AVQVGTHXGLEYNPGK

SEQ ID NO: 8073 - protein, 16 aa, Artificial Sequence
  source: /note="Description of Artificial Sequence: Synthetic peptide"
  MOD_RES (4)..(4): Citrulline
GTHXGLEYNPGKILPG

SEQ ID NO: 8074 - protein, 16 aa, Artificial Sequence
  source: /note="Description of Artificial Sequence: Synthetic peptide"
  MOD_RES (8)..(8): Citrulline
  MOD_RES (11)..(11): Citrulline
KMTIEPPXGVXANLLK

SEQ ID NO: 8075 - protein, 16 aa, Artificial Sequence
  source: /note="Description of Artificial Sequence: Synthetic peptide"
  MOD_RES (9)..(9): Citrulline
  MOD_RES (13)..(13): Citrulline
HSSISTQYXQMKXGSL

SEQ ID NO: 8076 - protein, 16 aa, Artificial Sequence
  source: /note="Description of Artificial Sequence: Synthetic peptide"
  MOD_RES (5)..(5): Citrulline
  MOD_RES (9)..(9): Citrulline
STQYXQMKXGSLGVLT

SEQ ID NO: 8077 - protein, 16 aa, Artificial Sequence
  source: /note="Description of Artificial Sequence: Synthetic peptide"
  MOD_RES (1)..(1): Citrulline
  MOD_RES (5)..(5): Citrulline
XQMKXGSLGVLTMSQL

SEQ ID NO: 8078 - protein, 16 aa, Artificial Sequence
  source: /note="Description of Artificial Sequence: Synthetic peptide"
  MOD_RES (10)..(10): Citrulline
  MOD_RES (12)..(12): Citrulline
NPDLEGQPLXMXGATK

SEQ ID NO: 8079 - protein, 16 aa, Artificial Sequence
  source: /note="Description of Artificial Sequence: Synthetic peptide"
  MOD_RES (6)..(6): Citrulline
  MOD_RES (8)..(8): Citrulline
EGQPLXMXGATKSSLL

SEQ ID NO: 8080 - protein, 16 aa, Artificial Sequence
  source: /note="Description of Artificial Sequence: Synthetic peptide"
  MOD_RES (2)..(2): Citrulline
  MOD_RES (4)..(4): Citrulline
LXMXGATKSSLLSAPS

SEQ ID NO: 8081 - protein, 16 aa, Artificial Sequence
  source: /note="Description of Artificial Sequence: Synthetic peptide"
  MOD_RES (5)..(5): Citrulline
  MOD_RES (9)..(9): Citrulline
ECTMXGVLXEQYLQKY

SEQ ID NO: 8082 - protein, 16 aa, Artificial Sequence
  source: /note="Description of Artificial Sequence: Synthetic peptide"
  MOD_RES (4)..(4): Citrulline
  MOD_RES (12)..(12): Citrulline
VAFXTSELTTLXGAIL

SEQ ID NO: 8083 - protein, 16 aa, Artificial Sequence
  source: /note="Description of Artificial Sequence: Synthetic peptide"
  MOD_RES (8)..(8): Citrulline
TSELTTLXGAILEDAI

SEQ ID NO: 8084 - protein, 16 aa, Artificial Sequence
  source: /note="Description of Artificial Sequence: Synthetic peptide"
  MOD_RES (5)..(5): Citrulline
  MOD_RES (10)..(10): Citrulline
PSTAXHGTAXGLPLKE

SEQ ID NO: 8085 - protein, 16 aa, Artificial Sequence
  source: /note="Description of Artificial Sequence: Synthetic peptide"
  MOD_RES (1)..(1): Citrulline
  MOD_RES (6)..(6): Citrulline
XHGTAXGLPLKEVLEY

SEQ ID NO: 8086 - protein, 16 aa, Artificial Sequence
  source: /note="Description of Artificial Sequence: Synthetic peptide"
  MOD_RES (2)..(2): Citrulline
AXGLPLKEVLEYVIPE

SEQ ID NO: 8087 - protein, 16 aa, Artificial Sequence
  source: /note="Description of Artificial Sequence: Synthetic peptide"
  MOD_RES (8)..(8): Citrulline
SEPKQTTXGTSYIEEV

SEQ ID NO: 8088 - protein, 16 aa, Artificial Sequence
  source: /note="Description of Artificial Sequence: Synthetic peptide"
  MOD_RES (1)..(1): Citrulline
  MOD_RES (13)..(13): Citrulline
XGSPLPHVTWKLXGKD

SEQ ID NO: 8089 - protein, 16 aa, Artificial Sequence
  source: /note="Description of Artificial Sequence: Synthetic peptide"
  MOD_RES (9)..(9): Citrulline
LPHVTWKLXGKDLGQG

SEQ ID NO: 8090 - protein, 16 aa, Artificial Sequence
  source: /note="Description of Artificial Sequence: Synthetic peptide"
  MOD_RES (5)..(5): Citrulline
TWKLXGKDLGQGQGQV

SEQ ID NO: 8091 - protein, 16 aa, Artificial Sequence
  source: /note="Description of Artificial Sequence: Synthetic peptide"
  MOD_RES (10)..(10): Citrulline
LPGLLPAAPXGSLTSQ

SEQ ID NO: 8092 - protein, 16 aa, Artificial Sequence
  source: /note="Description of Artificial Sequence: Synthetic peptide"
  MOD_RES (6)..(6): Citrulline
  MOD_RES (16)..(16): Citrulline
LPAAPXGSLTSQSSGX

SEQ ID NO: 8093 - protein, 16 aa, Artificial Sequence
  source: /note="Description of Artificial Sequence: Synthetic peptide"
  MOD_RES (2)..(2): Citrulline
  MOD_RES (12)..(12): Citrulline
PXGSLTSQSSGXGSAS

SEQ ID NO: 8094 - protein, 16 aa, Artificial Sequence
  source: /note="Description of Artificial Sequence: Synthetic peptide"
  MOD_RES (11)..(11): Citrulline
  MOD_RES (14)..(14): Citrulline
LSMIDAATSQXGTXKV

SEQ ID NO: 8095 - protein, 16 aa, Artificial Sequence
  source: /note="Description of Artificial Sequence: Synthetic peptide"
  MOD_RES (7)..(7): Citrulline
  MOD_RES (10)..(10): Citrulline
DAATSQXGTXKVPKCM

SEQ ID NO: 8096 - protein, 16 aa, Artificial Sequence
  source: /note="Description of Artificial Sequence: Synthetic peptide"
  MOD_RES (4)..(4): Citrulline
  MOD_RES (10)..(10): Citrulline
GVGXMGELYXGAMTSS

SEQ ID NO: 8097 - protein, 16 aa, Artificial Sequence
  source: /note="Description of Artificial Sequence: Synthetic peptide"
  MOD_RES (3)..(3): Citrulline
  MOD_RES (11)..(11): Citrulline
GAXEGWLLGPXGEKGG

SEQ ID NO: 8098 - protein, 16 aa, Artificial Sequence
  source: /note="Description of Artificial Sequence: Synthetic peptide"
  MOD_RES (8)..(8): Citrulline
TYFFPTEXGGKIYYDG

SEQ ID NO: 8099 - protein, 16 aa, Artificial Sequence
  source: /note="Description of Artificial Sequence: Synthetic peptide"
  MOD_RES (4)..(4): Citrulline
PTEXGGKIYYDGMGQD

SEQ ID NO: 8100 - protein, 16 aa, Artificial Sequence
  source: /note="Description of Artificial Sequence: Synthetic peptide"
  MOD_RES (10)..(10): Citrulline
TDCLPEFIGXGMAMAS

SEQ ID NO: 8101 - protein, 16 aa, Artificial Sequence
  source: /note="Description of Artificial Sequence: Synthetic peptide"
  MOD_RES (6)..(6): Citrulline
PEFIGXGMAMASFYHA

SEQ ID NO: 8102 - protein, 16 aa, Artificial Sequence
  source: /note="Description of Artificial Sequence: Synthetic peptide"
  MOD_RES (11)..(11): Citrulline
  MOD_RES (16)..(16): Citrulline
PWSSCSVSCGXGHKQX

SEQ ID NO: 8103 - protein, 16 aa, Artificial Sequence
  source: /note="Description of Artificial Sequence: Synthetic peptide"
  MOD_RES (7)..(7): Citrulline
  MOD_RES (12)..(12): Citrulline
CSVSCGXGHKQXNVYC

SEQ ID NO: 8104 - protein, 16 aa, Artificial Sequence
  source: /note="Description of Artificial Sequence: Synthetic peptide"
  MOD_RES (3)..(3): Citrulline
  MOD_RES (11)..(11): Citrulline
AAXLGILPVGXGKTMS

SEQ ID NO: 8105 - protein, 16 aa, Artificial Sequence
  source: /note="Description of Artificial Sequence: Synthetic peptide"
  MOD_RES (7)..(7): Citrulline
  MOD_RES (16)..(16): Citrulline
GILPVGXGKTMSSQGX

SEQ ID NO: 8106 - protein, 16 aa, Artificial Sequence
  source: /note="Description of Artificial Sequence: Synthetic peptide"
  MOD_RES (7)..(8): Citrulline
LGEVWQXXGSLEGAAA

SEQ ID NO: 8107 - protein, 16 aa, Artificial Sequence
  source: /note="Description of Artificial Sequence: Synthetic peptide"
  MOD_RES (3)..(4): Citrulline
WQXXGSLEGAAAAAES

SEQ ID NO: 8108 - protein, 16 aa, Artificial Sequence
  source: /note="Description of Artificial Sequence: Synthetic peptide"
  MOD_RES (13)..(13): Citrulline
HALLHPSYCQSPXGSP

SEQ ID NO: 8109 - protein, 16 aa, Artificial Sequence
  source: /note="Description of Artificial Sequence: Synthetic peptide"
  MOD_RES (9)..(9): Citrulline
HPSYCQSPXGSPVSSP

SEQ ID NO: 8110 - protein, 16 aa, Artificial Sequence
  source: /note="Description of Artificial Sequence: Synthetic peptide"
  MOD_RES (5)..(5): Citrulline
CQSPXGSPVSSPQNSP

SEQ ID NO: 8111 - protein, 16 aa, Artificial Sequence
  source: /note="Description of Artificial Sequence: Synthetic peptide"
  MOD_RES (1)..(1): Citrulline
  MOD_RES (16)..(16): Citrulline
XGSPVSSPQNSPGTQX

SEQ ID NO: 8112 - protein, 16 aa, Artificial Sequence
  source: /note="Description of Artificial Sequence: Synthetic peptide"
  MOD_RES (1)..(1): Citrulline
  MOD_RES (10)..(10): Citrulline
XQVGEAAAGXGSLEWL

SEQ ID NO: 8113 - protein, 16 aa, Artificial Sequence
  source: /note="Description of Artificial Sequence: Synthetic peptide"
  MOD_RES (6)..(6): Citrulline
EAAAGXGSLEWLDLDG

SEQ ID NO: 8114 - protein, 16 aa, Artificial Sequence
  source: /note="Description of Artificial Sequence: Synthetic peptide"
  MOD_RES (11)..(11): Citrulline
PKIFTSTTQTXGAKGL

SEQ ID NO: 8115 - protein, 16 aa, Artificial Sequence
  source: /note="Description of Artificial Sequence: Synthetic peptide"
  MOD_RES (7)..(7): Citrulline
TSTTQTXGAKGLADPS

SEQ ID NO: 8116 - protein, 16 aa, Artificial Sequence
  source: /note="Description of Artificial Sequence: Synthetic peptide"
  MOD_RES (2)..(2): Citrulline
  MOD_RES (11)..(11): Citrulline
QXKQLHDFVAXGTVLS

SEQ ID NO: 8117 - protein, 16 aa, Artificial Sequence
  source: /note="Description of Artificial Sequence: Synthetic peptide"
  MOD_RES (7)..(7): Citrulline
LHDFVAXGTVLSYCET

SEQ ID NO: 8118 - protein, 16 aa, Artificial Sequence
  source: /note="Description of Artificial Sequence: Synthetic peptide"
  MOD_RES (8)..(8): Citrulline
LTDTAGLXGSALGLPQ

SEQ ID NO: 8119 - protein, 16 aa, Artificial Sequence
  source: /note="Description of Artificial Sequence: Synthetic peptide"
  MOD_RES (4)..(4): Citrulline
AGLXGSALGLPQACQP

SEQ ID NO: 8120 - protein, 16 aa, Artificial Sequence
  source: /note="Description of Artificial Sequence: Synthetic peptide"
  MOD_RES (3)..(3): Citrulline
  MOD_RES (7)..(7): Citrulline
PSXKMVXGEILPSAWI

SEQ ID NO: 8121 - protein, 16 aa, Artificial Sequence
  source: /note="Description of Artificial Sequence: Synthetic peptide"
  MOD_RES (3)..(3): Citrulline
MVXGEILPSAWILQPI

SEQ ID NO: 8122 - protein, 16 aa, Artificial Sequence
  source: /note="Description of Artificial Sequence: Synthetic peptide"
  MOD_RES (11)..(11): Citrulline
EHYKKLNGQTXGQAIV

SEQ ID NO: 8123 - protein, 16 aa, Artificial Sequence
  source: /note="Description of Artificial Sequence: Synthetic peptide"
  MOD_RES (7)..(7): Citrulline
KLNGQTXGQAIVNYMS

SEQ ID NO: 8124 - protein, 16 aa, Artificial Sequence
  source: /note="Description of Artificial Sequence: Synthetic peptide"
  MOD_RES (3)..(3): Citrulline
QTXGQAIVNYMSIVES

SEQ ID NO: 8125 - protein, 16 aa, Artificial Sequence
  source: /note="Description of Artificial Sequence: Synthetic peptide"
  MOD_RES (6)..(6): Citrulline
  MOD_RES (10)..(10): Citrulline
NSFAAXLIQXGSHTDA

SEQ ID NO: 8126 - protein, 16 aa, Artificial Sequence
  source: /note="Description of Artificial Sequence: Synthetic peptide"
  MOD_RES (2)..(2): Citrulline
  MOD_RES (6)..(6): Citrulline
AXLIQXGSHTDAPDTA

SEQ ID NO: 8127 - protein, 16 aa, Artificial Sequence
  source: /note="Description of Artificial Sequence: Synthetic peptide"
  MOD_RES (10)..(10): Citrulline
  MOD_RES (12)..(12): Citrulline
VEAEEETWAXGXSLGS

SEQ ID NO: 8128 - protein, 16 aa, Artificial Sequence
  source: /note="Description of Artificial Sequence: Synthetic peptide"
  MOD_RES (6)..(6): Citrulline
  MOD_RES (8)..(8): Citrulline
EETWAXGXSLGSLASL

SEQ ID NO: 8129 - protein, 16 aa, Artificial Sequence
  source: /note="Description of Artificial Sequence: Synthetic peptide"
  MOD_RES (9)..(9): Citrulline
  MOD_RES (11)..(11): Citrulline
TPASAPAHXGXGGWTL

SEQ ID NO: 8130 - protein, 16 aa, Artificial Sequence
  source: /note="Description of Artificial Sequence: Synthetic peptide"
  MOD_RES (5)..(5): Citrulline
  MOD_RES (7)..(7): Citrulline
APAHXGXGGWTLNSAG

SEQ ID NO: 8131 - protein, 16 aa, Artificial Sequence
  source: /note="Description of Artificial Sequence: Synthetic peptide"
  MOD_RES (11)..(11): Citrulline
LLHGGVAVSSXGTPLE

SEQ ID NO: 8132 - protein, 16 aa, Artificial Sequence
  source: /note="Description of Artificial Sequence: Synthetic peptide"
  MOD_RES (7)..(7): Citrulline
GVAVSSXGTPLELVNG

SEQ ID NO: 8133 - protein, 16 aa, Artificial Sequence
  source: /note="Description of Artificial Sequence: Synthetic peptide"
  MOD_RES (10)..(10): Citrulline
HLQSYEGQSXGAWLGM

SEQ ID NO: 8134 - protein, 16 aa, Artificial Sequence
  source: /note="Description of Artificial Sequence: Synthetic peptide"
  MOD_RES (6)..(6): Citrulline
YEGQSXGAWLGMNFNP

SEQ ID NO: 8135 - protein, 16 aa, Artificial Sequence
  source: /note="Description of Artificial Sequence: Synthetic peptide"
  MOD_RES (2)..(2): Citrulline
SXGAWLGMNFNPKGGT

SEQ ID NO: 8136 - protein, 16 aa, Artificial Sequence
  source: /note="Description of Artificial Sequence: Synthetic peptide"
  MOD_RES (10)..(10): Citrulline
  MOD_RES (15)..(15): Citrulline
TEGNCTALTXGELKXL

SEQ ID NO: 8137 - protein, 16 aa, Artificial Sequence
  source: /note="Description of Artificial Sequence: Synthetic peptide"
  MOD_RES (6)..(6): Citrulline
  MOD_RES (11)..(11): Citrulline
CTALTXGELKXLLEQE

SEQ ID NO: 8138 - protein, 16 aa, Artificial Sequence
  source: /note="Description of Artificial Sequence: Synthetic peptide"
  MOD_RES (13)..(13): Citrulline
LTSYTLIQTATSXGAS

SEQ ID NO: 8139 - protein, 16 aa, Artificial Sequence
  source: /note="Description of Artificial Sequence: Synthetic peptide"
  MOD_RES (9)..(9): Citrulline
TLIQTATSXGASPIGP

SEQ ID NO: 8140 - protein, 16 aa, Artificial Sequence
  source: /note="Description of Artificial Sequence: Synthetic peptide"
  MOD_RES (8)..(8): Citrulline
  MOD_RES (16)..(16): Citrulline
GGITVLTXGDSTSSTX

SEQ ID NO: 8141 - protein, 16 aa, Artificial Sequence
  source: /note="Description of Artificial Sequence: Synthetic peptide"
  MOD_RES (4)..(4): Citrulline
  MOD_RES (12)..(12): Citrulline
VLTXGDSTSSTXSTGK

SEQ ID NO: 8142 - protein, 16 aa, Artificial Sequence
  source: /note="Description of Artificial Sequence: Synthetic peptide"
  MOD_RES (9)..(9): Citrulline
  MOD_RES (14)..(14): Citrulline
QVVEYYSHXGLPPXSL

SEQ ID NO: 8143 - protein, 16 aa, Artificial Sequence
  source: /note="Description of Artificial Sequence: Synthetic peptide"
  MOD_RES (5)..(5): Citrulline
  MOD_RES (10)..(10): Citrulline
YYSHXGLPPXSLGVPA

SEQ ID NO: 8144 - protein, 16 aa, Artificial Sequence
  source: /note="Description of Artificial Sequence: Synthetic peptide"
  MOD_RES (7)..(7): Citrulline
EVLGLLXGSKLSTIQS

SEQ ID NO: 8145 - protein, 16 aa, Artificial Sequence
  source: /note="Description of Artificial Sequence: Synthetic peptide"
  MOD_RES (3)..(3): Citrulline
LLXGSKLSTIQSANAS

SEQ ID NO: 8146 - protein, 16 aa, Artificial Sequence
  source: /note="Description of Artificial Sequence: Synthetic peptide"
  MOD_RES (5)..(5): Citrulline
  MOD_RES (10)..(10): Citrulline
QLESXGLASXGDLSIP

SEQ ID NO: 8147 - protein, 16 aa, Artificial Sequence
  source: /note="Description of Artificial Sequence: Synthetic peptide"
  MOD_RES (1)..(1): Citrulline
  MOD_RES (6)..(6): Citrulline
XGLASXGDLSIPGLSE

SEQ ID NO: 8148 - protein, 16 aa, Artificial Sequence
  source: /note="Description of Artificial Sequence: Synthetic peptide"
  MOD_RES (6)..(6): Citrulline
LLAGLXGEPMPSELKL

SEQ ID NO: 8149 - protein, 12 aa, Artificial Sequence
  source: /note="Description of Artificial Sequence: Synthetic peptide"
  MOD_RES (2)..(2): Citrulline
LXGEPMPSELKL

SEQ ID NO: 8150 - protein, 16 aa, Artificial Sequence
  source: /note="Description of Artificial Sequence: Synthetic peptide"
  MOD_RES (4)..(4): Citrulline
  MOD_RES (8)..(8): Citrulline
LAEXCFSXGESVYCKD

SEQ ID NO: 8151 - protein, 16 aa, Artificial Sequence
  source: /note="Description of Artificial Sequence: Synthetic peptide"
  MOD_RES (4)..(4): Citrulline
CFSXGESVYCKDDFFK

SEQ ID NO: 8152 - protein, 16 aa, Artificial Sequence
  source: /note="Description of Artificial Sequence: Synthetic peptide"
  MOD_RES (8)..(8): Citrulline
YSLYLFTXGEGPLKTS

SEQ ID NO: 8153 - protein, 16 aa, Artificial Sequence
  source: /note="Description of Artificial Sequence: Synthetic peptide"
  MOD_RES (4)..(4): Citrulline
LFTXGEGPLKTSQDLI

SEQ ID NO: 8154 - protein, 16 aa, Artificial Sequence
  source: /note="Description of Artificial Sequence: Synthetic peptide"
  MOD_RES (10)..(10): Citrulline
KSPDTVCLSXGKLLVE

SEQ ID NO: 8155 - protein, 16 aa, Artificial Sequence
  source: /note="Description of Artificial Sequence: Synthetic peptide"
  MOD_RES (6)..(6): Citrulline
TVCLSXGKLLVEKAIK

SEQ ID NO: 8156 - protein, 16 aa, Artificial Sequence
  source: /note="Description of Artificial Sequence: Synthetic peptide"
  MOD_RES (2)..(2): Citrulline
SXGKLLVEKAIKDHDF

SEQ ID NO: 8157 - protein, 16 aa, Artificial Sequence
  source: /note="Description of Artificial Sequence: Synthetic peptide"
  MOD_RES (10)..(10): Citrulline
FSGATMASSXGALVTV

SEQ ID NO: 8158 - protein, 16 aa, Artificial Sequence
  source: /note="Description of Artificial Sequence: Synthetic peptide"
  MOD_RES (6)..(6): Citrulline
TMASSXGALVTVGQLS

SEQ ID NO: 8159 - protein, 16 aa, Artificial Sequence
  source: /note="Description of Artificial Sequence: Synthetic peptide"
  MOD_RES (12)..(12): Citrulline
YLPCPEKLPYMXGFLN

SEQ ID NO: 8160 - protein, 16 aa, Artificial Sequence
  source: /note="Description of Artificial Sequence: Synthetic peptide"
  MOD_RES (6)..(6): Citrulline
VDDFIXGQLVTNLPGV

SEQ ID NO: 8161 - protein, 16 aa, Artificial Sequence
  source: /note="Description of Artificial Sequence: Synthetic peptide"
  MOD_RES (2)..(2): Citrulline
IXGQLVTNLPGVGHSM

SEQ ID NO: 8162 - protein, 16 aa, Artificial Sequence
  source: /note="Description of Artificial Sequence: Synthetic peptide"
  MOD_RES (9)..(9): Citrulline
ENPGGPPSXGLLDDGF

SEQ ID NO: 8163 - protein, 16 aa, Artificial Sequence
  source: /note="Description of Artificial Sequence: Synthetic peptide"
  MOD_RES (5)..(5): Citrulline
GPPSXGLLDDGFQVLP

SEQ ID NO: 8164 - protein, 16 aa, Artificial Sequence
  source: /note="Description of Artificial Sequence: Synthetic peptide"
  MOD_RES (10)..(10): Citrulline
QYEHSVQINXGSSHQV

SEQ ID NO: 8165 - protein, 16 aa, Artificial Sequence
  source: /note="Description of Artificial Sequence: Synthetic peptide"
  MOD_RES (6)..(6): Citrulline
SVQINXGSSHQVEYEI

SEQ ID NO: 8166 - protein, 16 aa, Artificial Sequence
  source: /note="Description of Artificial Sequence: Synthetic peptide"
  MOD_RES (11)..(11): Citrulline
  MOD_RES (16)..(16): Citrulline
KETPQSLAFTXGEVFX

SEQ ID NO: 8167 - protein, 16 aa, Artificial Sequence
  source: /note="Description of Artificial Sequence: Synthetic peptide"
  MOD_RES (4)..(4): Citrulline
  MOD_RES (10)..(10): Citrulline
APSXPYQDTXGSYGSD

SEQ ID NO: 8168 - protein, 16 aa, Artificial Sequence
  source: /note="Description of Artificial Sequence: Synthetic peptide"
  MOD_RES (4)..(4): Citrulline
  MOD_RES (12)..(12): Citrulline
GPCXPPPPPQAXGLLT

SEQ ID NO: 8169 - protein, 16 aa, Artificial Sequence
  source: /note="Description of Artificial Sequence: Synthetic peptide"
  MOD_RES (11)..(11): Citrulline
STPLTATPGGXGDMKY

SEQ ID NO: 8170 - protein, 16 aa, Artificial Sequence
  source: /note="Description of Artificial Sequence: Synthetic peptide"
  MOD_RES (7)..(7): Citrulline
TATPGGXGDMKYGIYA

SEQ ID NO: 8171 - protein, 16 aa, Artificial Sequence
  source: /note="Description of Artificial Sequence: Synthetic peptide"
  MOD_RES (11)..(11): Citrulline
  MOD_RES (13)..(13): Citrulline
GQFLHPDAWVXGXSPS

SEQ ID NO: 8172 - protein, 16 aa, Artificial Sequence
  source: /note="Description of Artificial Sequence: Synthetic peptide"
  MOD_RES (7)..(7): Citrulline
  MOD_RES (9)..(9): Citrulline
HPDAWVXGXSPSDISS

SEQ ID NO: 8173 - protein, 16 aa, Artificial Sequence
  source: /note="Description of Artificial Sequence: Synthetic peptide"
  MOD_RES (1)..(1): Citrulline
  MOD_RES (7)..(7): Citrulline
XCVDLSXGLLEPPSLA

SEQ ID NO: 8174 - protein, 16 aa, Artificial Sequence
  source: /note="Description of Artificial Sequence: Synthetic peptide"
  MOD_RES (3)..(3): Citrulline
LSXGLLEPPSLAEASL

SEQ ID NO: 8175 - protein, 16 aa, Artificial Sequence
  source: /note="Description of Artificial Sequence: Synthetic peptide"
  MOD_RES (8)..(8): Citrulline
  MOD_RES (16)..(16): Citrulline
AFGVKLVXGAYLDKEX

SEQ ID NO: 8176 - protein, 16 aa, Artificial Sequence
  source: /note="Description of Artificial Sequence: Synthetic peptide"
  MOD_RES (4)..(4): Citrulline
  MOD_RES (12)..(12): Citrulline
KLVXGAYLDKEXAVAQ

SEQ ID NO: 8177 - protein, 16 aa, Artificial Sequence
  source: /note="Description of Artificial Sequence: Synthetic peptide"
  MOD_RES (7)..(7): Citrulline
  MOD_RES (9)..(9): Citrulline
VLASPQXSXGTALPFL

SEQ ID NO: 8178 - protein, 16 aa, Artificial Sequence
  source: /note="Description of Artificial Sequence: Synthetic peptide"
  MOD_RES (3)..(3): Citrulline
  MOD_RES (5)..(5): Citrulline
PQXSXGTALPFLPSNV

SEQ ID NO: 8179 - protein, 16 aa, Artificial Sequence
  source: /note="Description of Artificial Sequence: Synthetic peptide"
  MOD_RES (10)..(10): Citrulline
KQVLQTLEQXGQVLLG

SEQ ID NO: 8180 - protein, 16 aa, Artificial Sequence
  source: /note="Description of Artificial Sequence: Synthetic peptide"
  MOD_RES (6)..(6): Citrulline
QTLEQXGQVLLGHIQK

SEQ ID NO: 8181 - protein, 16 aa, Artificial Sequence
  source: /note="Description of Artificial Sequence: Synthetic peptide"
  MOD_RES (3)..(3): Citrulline
  MOD_RES (12)..(12): Citrulline
PPXVPGQQALSXGDKG

SEQ ID NO: 8182 - protein, 16 aa, Artificial Sequence
  source: /note="Description of Artificial Sequence: Synthetic peptide"
  MOD_RES (8)..(8): Citrulline
PGQQALSXGDKGISVS

SEQ ID NO: 8183 - protein, 16 aa, Artificial Sequence
  source: /note="Description of Artificial Sequence: Synthetic peptide"
  MOD_RES (4)..(4): Citrulline
ALSXGDKGISVSLSLP

SEQ ID NO: 8184 - protein, 16 aa, Artificial Sequence
  source: /note="Description of Artificial Sequence: Synthetic peptide"
  MOD_RES (8)..(8): Citrulline
EVLVGQAXGALEEKDF

SEQ ID NO: 8185 - protein, 16 aa, Artificial Sequence
  source: /note="Description of Artificial Sequence: Synthetic peptide"
  MOD_RES (11)..(11): Citrulline
  MOD_RES (16)..(16): Citrulline
GSPPLEELFTXGGPLX

SEQ ID NO: 8186 - protein, 16 aa, Artificial Sequence
  source: /note="Description of Artificial Sequence: Synthetic peptide"
  MOD_RES (7)..(7): Citrulline
  MOD_RES (12)..(12): Citrulline
LEELFTXGGPLXTFLE

SEQ ID NO: 8187 - protein, 16 aa, Artificial Sequence
  source: /note="Description of Artificial Sequence: Synthetic peptide"
  MOD_RES (8)..(8): Citrulline
ENDGYGNXGAGANLNT

SEQ ID NO: 8188 - protein, 16 aa, Artificial Sequence
  source: /note="Description of Artificial Sequence: Synthetic peptide"
  MOD_RES (4)..(4): Citrulline
YGNXGAGANLNTDDDV

SEQ ID NO: 8189 - protein, 16 aa, Artificial Sequence
  source: /note="Description of Artificial Sequence: Synthetic peptide"
  MOD_RES (11)..(11): Citrulline
  MOD_RES (16)..(16): Citrulline
PGSPSKGFFSXGPQPX

SEQ ID NO: 8190 - protein, 16 aa, Artificial Sequence
  source: /note="Description of Artificial Sequence: Synthetic peptide"
  MOD_RES (7)..(7): Citrulline
  MOD_RES (12)..(12): Citrulline
SKGFFSXGPQPXPSSP

SEQ ID NO: 8191 - protein, 16 aa, Artificial Sequence
  source: /note="Description of Artificial Sequence: Synthetic peptide"
  MOD_RES (9)..(9): Citrulline
  MOD_RES (11)..(11): Citrulline
DTLIELVTXGXSIPVH

SEQ ID NO: 8192 - protein, 16 aa, Artificial Sequence
  source: /note="Description of Artificial Sequence: Synthetic peptide"
  MOD_RES (5)..(5): Citrulline
  MOD_RES (7)..(7): Citrulline
ELVTXGXSIPVHLNSL

SEQ ID NO: 8193 - protein, 16 aa, Artificial Sequence
  source: /note="Description of Artificial Sequence: Synthetic peptide"
  MOD_RES (3)..(3): Citrulline
  MOD_RES (9)..(9): Citrulline
IAXVCDGAXGSFTSSS

SEQ ID NO: 8194 - protein, 16 aa, Artificial Sequence
  source: /note="Description of Artificial Sequence: Synthetic peptide"
  MOD_RES (13)..(13): Citrulline
TPPTDSPSKAGPXGSV

SEQ ID NO: 8195 - protein, 16 aa, Artificial Sequence
  source: /note="Description of Artificial Sequence: Synthetic peptide"
  MOD_RES (9)..(9): Citrulline
DSPSKAGPXGSVQYLP

SEQ ID NO: 8196 - protein, 16 aa, Artificial Sequence
  source: /note="Description of Artificial Sequence: Synthetic peptide"
  MOD_RES (5)..(5): Citrulline
KAGPXGSVQYLPDLDD

SEQ ID NO: 8197 - protein, 16 aa, Artificial Sequence
  source: /note="Description of Artificial Sequence: Synthetic peptide"
  MOD_RES (1)..(1): Citrulline
XGSVQYLPDLDDKNSQ

SEQ ID NO: 8198 - protein, 16 aa, Artificial Sequence
  source: /note="Description of Artificial Sequence: Synthetic peptide"
  MOD_RES (11)..(12): Citrulline
GLLCVACGSYXXGKAT

SEQ ID NO: 8199 - protein, 16 aa, Artificial Sequence
  source: /note="Description of Artificial Sequence: Synthetic peptide"
  MOD_RES (7)..(8): Citrulline
VACGSYXXGKATCGDV

SEQ ID NO: 8200 - protein, 16 aa, Artificial Sequence
  source: /note="Description of Artificial Sequence: Synthetic peptide"
  MOD_RES (10)..(10): Citrulline
VSEIAPPGVXGALGAT

SEQ ID NO: 8201 - protein, 16 aa, Artificial Sequence
  source: /note="Description of Artificial Sequence: Synthetic peptide"
  MOD_RES (6)..(6): Citrulline
APPGVXGALGATPQLM

SEQ ID NO: 8202 - protein, 16 aa, Artificial Sequence
  source: /note="Description of Artificial Sequence: Synthetic peptide"
  MOD_RES (2)..(2): Citrulline
VXGALGATPQLMAVFG

SEQ ID NO: 8203 - protein, 16 aa, Artificial Sequence
  source: /note="Description of Artificial Sequence: Synthetic peptide"
  MOD_RES (4)..(4): Citrulline
  MOD_RES (11)..(11): Citrulline
GAPXDCYVDPXGSPAL

SEQ ID NO: 8204 - protein, 16 aa, Artificial Sequence
  source: /note="Description of Artificial Sequence: Synthetic peptide"
  MOD_RES (7)..(7): Citrulline
DCYVDPXGSPALLPST

SEQ ID NO: 8205 - protein, 16 aa, Artificial Sequence
  source: /note="Description of Artificial Sequence: Synthetic peptide"
  MOD_RES (3)..(3): Citrulline
DPXGSPALLPSTPTMP

SEQ ID NO: 8206 - protein, 16 aa, Artificial Sequence
  source: /note="Description of Artificial Sequence: Synthetic peptide"
  MOD_RES (9)..(9): Citrulline
ALDSFGSTXGSLDKPD

SEQ ID NO: 8207 - protein, 16 aa, Artificial Sequence
  source: /note="Description of Artificial Sequence: Synthetic peptide"
  MOD_RES (5)..(5): Citrulline
FGSTXGSLDKPDSFME

SEQ ID NO: 8208 - protein, 16 aa, Artificial Sequence
  source: /note="Description of Artificial Sequence: Synthetic peptide"
  MOD_RES (2)..(2): Citrulline
  MOD_RES (14)..(14): Citrulline
NXDLLFDPLGGVKXGS

SEQ ID NO: 8209 - protein, 16 aa, Artificial Sequence
  source: /note="Description of Artificial Sequence: Synthetic peptide"
  MOD_RES (10)..(10): Citrulline
LFDPLGGVKXGSLTIA

SEQ ID NO: 8210 - protein, 16 aa, Artificial Sequence
  source: /note="Description of Artificial Sequence: Synthetic peptide"
  MOD_RES (9)..(9): Citrulline
SQTNELASXGLLNKSI

SEQ ID NO: 8211 - protein, 16 aa, Artificial Sequence
  source: /note="Description of Artificial Sequence: Synthetic peptide"
  MOD_RES (5)..(5): Citrulline
ELASXGLLNKSIGSLL

SEQ ID NO: 8212 - protein, 16 aa, Artificial Sequence
  source: /note="Description of Artificial Sequence: Synthetic peptide"
  MOD_RES (4)..(4): Citrulline
  MOD_RES (9)..(9): Citrulline
ENPXFYGFXGEALANI

SEQ ID NO: 8213 - protein, 16 aa, Artificial Sequence
  source: /note="Description of Artificial Sequence: Synthetic peptide"
  MOD_RES (5)..(5): Citrulline
FYGFXGEALANIADMA

SEQ ID NO: 8214 - protein, 16 aa, Artificial Sequence
  source: /note="Description of Artificial Sequence: Synthetic peptide"
  MOD_RES (9)..(9): Citrulline
PELNDKLSXGSVINQN

SEQ ID NO: 8215 - protein, 16 aa, Artificial Sequence
  source: /note="Description of Artificial Sequence: Synthetic peptide"
  MOD_RES (5)..(5): Citrulline
DKLSXGSVINQNDLAK

SEQ ID NO: 8216 - protein, 16 aa, Artificial Sequence
  source: /note="Description of Artificial Sequence: Synthetic peptide"
  MOD_RES (1)..(1): Citrulline
XGSVINQNDLAKSSEG

SEQ ID NO: 8217 - protein, 16 aa, Artificial Sequence
  source: /note="Description of Artificial Sequence: Synthetic peptide"
  MOD_RES (3)..(3): Citrulline
  MOD_RES (9)..(9): Citrulline
TWXGADILXGSPSYTQ

SEQ ID NO: 8218 - protein, 16 aa, Artificial Sequence
  source: /note="Description of Artificial Sequence: Synthetic peptide"
  MOD_RES (9)..(10): Citrulline
SDVLLEPFXXGVMEKL

SEQ ID NO: 8219 - protein, 16 aa, Artificial Sequence
  source: /note="Description of Artificial Sequence: Synthetic peptide"
  MOD_RES (5)..(6): Citrulline
LEPFXXGVMEKLQLGP

SEQ ID NO: 8220 - protein, 16 aa, Artificial Sequence
  source: /note="Description of Artificial Sequence: Synthetic peptide"
  MOD_RES (8)..(8): Citrulline
SIVLLSTXGEIKQLNI

SEQ ID NO: 8221 - protein, 16 aa, Artificial Sequence
  source: /note="Description of Artificial Sequence: Synthetic peptide"
  MOD_RES (4)..(4): Citrulline
LSTXGEIKQLNISHLL

SEQ ID NO: 8222 - protein, 16 aa, Artificial Sequence
  source: /note="Description of Artificial Sequence: Synthetic peptide"
  MOD_RES (8)..(8): Citrulline
  MOD_RES (16)..(16): Citrulline
PPGPLGTXGAMHEVAX

SEQ ID NO: 8223 - protein, 16 aa, Artificial Sequence
  source: /note="Description of Artificial Sequence: Synthetic peptide"
  MOD_RES (11)..(11): Citrulline
TWQQFHKMAGXGSYGT

SEQ ID NO: 8224 - protein, 16 aa, Artificial Sequence
  source: /note="Description of Artificial Sequence: Synthetic peptide"
  MOD_RES (7)..(7): Citrulline
FHKMAGXGSYGTDESP

SEQ ID NO: 8225 - protein, 16 aa, Artificial Sequence
  source: /note="Description of Artificial Sequence: Synthetic peptide"
  MOD_RES (3)..(3): Citrulline
AGXGSYGTDESPEPLP

SEQ ID NO: 8226 - protein, 16 aa, Artificial Sequence
  source: /note="Description of Artificial Sequence: Synthetic peptide"
  MOD_RES (9)..(9): Citrulline
MELVQVLKXGLQQITG

SEQ ID NO: 8227 - protein, 16 aa, Artificial Sequence
  source: /note="Description of Artificial Sequence: Synthetic peptide"
  MOD_RES (5)..(5): Citrulline
QVLKXGLQQITGHGGL

SEQ ID NO: 8228 - protein, 16 aa, Artificial Sequence
  source: /note="Description of Artificial Sequence: Synthetic peptide"
  MOD_RES (5)..(5): Citrulline
  MOD_RES (11)..(11): Citrulline
PESGXMFPISXGIPNM

SEQ ID NO: 8229 - protein, 16 aa, Artificial Sequence
  source: /note="Description of Artificial Sequence: Synthetic peptide"
  MOD_RES (1)..(1): Citrulline
  MOD_RES (7)..(7): Citrulline
XMFPISXGIPNMLLSE

SEQ ID NO: 8230 - protein, 16 aa, Artificial Sequence
  source: /note="Description of Artificial Sequence: Synthetic peptide"
  MOD_RES (7)..(7): Citrulline
  MOD_RES (10)..(10): Citrulline
TLPAKPXLQXGGSSAS

SEQ ID NO: 8231 - protein, 16 aa, Artificial Sequence
  source: /note="Description of Artificial Sequence: Synthetic peptide"
  MOD_RES (3)..(3): Citrulline
  MOD_RES (6)..(6): Citrulline
KPXLQXGGSSASLHNS

SEQ ID NO: 8232 - protein, 16 aa, Artificial Sequence
  source: /note="Description of Artificial Sequence: Synthetic peptide"
  MOD_RES (8)..(8): Citrulline
MEMTDFTXGKGPLKHT

SEQ ID NO: 8233 - protein, 16 aa, Artificial Sequence
  source: /note="Description of Artificial Sequence: Synthetic peptide"
  MOD_RES (4)..(4): Citrulline
DFTXGKGPLKHTTDVI

SEQ ID NO: 8234 - protein, 16 aa, Artificial Sequence
  source: /note="Description of Artificial Sequence: Synthetic peptide"
  MOD_RES (6)..(6): Citrulline
EVTAFXGSLLSWYDQE

SEQ ID NO: 8235 - protein, 16 aa, Artificial Sequence
  source: /note="Description of Artificial Sequence: Synthetic peptide"
  MOD_RES (2)..(2): Citrulline
  MOD_RES (14)..(14): Citrulline
FXGSLLSWYDQEKXDL

SEQ ID NO: 8236 - protein, 16 aa, Artificial Sequence
  source: /note="Description of Artificial Sequence: Synthetic peptide"
  MOD_RES (5)..(6): Citrulline
YEEFXXGFYKMCDEDI

SEQ ID NO: 8237 - protein, 16 aa, Artificial Sequence
  source: /note="Description of Artificial Sequence: Synthetic peptide"
  MOD_RES (11)..(11): Citrulline
ITEQADIALTXGAEVK

SEQ ID NO: 8238 - protein, 16 aa, Artificial Sequence
  source: /note="Description of Artificial Sequence: Synthetic peptide"
  MOD_RES (7)..(7): Citrulline
  MOD_RES (14)..(14): Citrulline
ADIALTXGAEVKGXCG

SEQ ID NO: 8239 - protein, 16 aa, Artificial Sequence
  source: /note="Description of Artificial Sequence: Synthetic peptide"
  MOD_RES (11)..(11): Citrulline
PPNLPGFQNGXGSSTS

SEQ ID NO: 8240 - protein, 16 aa, Artificial Sequence
  source: /note="Description of Artificial Sequence: Synthetic peptide"
  MOD_RES (7)..(7): Citrulline
PGFQNGXGSSTSSSSI

SEQ ID NO: 8241 - protein, 16 aa, Artificial Sequence
  source: /note="Description of Artificial Sequence: Synthetic peptide"
  MOD_RES (6)..(6): Citrulline
GWGTLXGAQGQKEKFW

SEQ ID NO: 8242 - protein, 16 aa, Artificial Sequence
  source: /note="Description of Artificial Sequence: Synthetic peptide"
  MOD_RES (2)..(2): Citrulline
LXGAQGQKEKFWIAAN

SEQ ID NO: 8243 - protein, 16 aa, Artificial Sequence
  source: /note="Description of Artificial Sequence: Synthetic peptide"
  MOD_RES (11)..(11): Citrulline
QVINLYKQLVXGEEVN

SEQ ID NO: 8244 - protein, 16 aa, Artificial Sequence
  source: /note="Description of Artificial Sequence: Synthetic peptide"
  MOD_RES (7)..(7): Citrulline
LYKQLVXGEEVNGDAT

SEQ ID NO: 8245 - protein, 16 aa, Artificial Sequence
  source: /note="Description of Artificial Sequence: Synthetic peptide"
  MOD_RES (3)..(3): Citrulline
  MOD_RES (11)..(11): Citrulline
AAXGTGALLLXGSLLA

SEQ ID NO: 8246 - protein, 16 aa, Artificial Sequence
  source: /note="Description of Artificial Sequence: Synthetic peptide"
  MOD_RES (7)..(7): Citrulline
  MOD_RES (15)..(15): Citrulline
TGALLLXGSLLASGXA

SEQ ID NO: 8247 - protein, 16 aa, Artificial Sequence
  source: /note="Description of Artificial Sequence: Synthetic peptide"
  MOD_RES (14)..(14): Citrulline
AGSLQGKPLQSWGXGS

SEQ ID NO: 8248 - protein, 16 aa, Artificial Sequence
  source: /note="Description of Artificial Sequence: Synthetic peptide"
  MOD_RES (10)..(10): Citrulline
QGKPLQSWGXGSAGGN

SEQ ID NO: 8249 - protein, 16 aa, Artificial Sequence
  source: /note="Description of Artificial Sequence: Synthetic peptide"
  MOD_RES (6)..(6): Citrulline
LQSWGXGSAGGNAHSP

SEQ ID NO: 8250 - protein, 16 aa, Artificial Sequence
  source: /note="Description of Artificial Sequence: Synthetic peptide"
  MOD_RES (2)..(2): Citrulline
GXGSAGGNAHSPLGVP

SEQ ID NO: 8251 - protein, 16 aa, Artificial Sequence
  source: /note="Description of Artificial Sequence: Synthetic peptide"
  MOD_RES (8)..(8): Citrulline
  MOD_RES (11)..(11): Citrulline
LDLDFHQXVHXGEKPY

SEQ ID NO: 8252 - protein, 16 aa, Artificial Sequence
  source: /note="Description of Artificial Sequence: Synthetic peptide"
  MOD_RES (4)..(4): Citrulline
  MOD_RES (7)..(7): Citrulline
FHQXVHXGEKPYNCKE

SEQ ID NO: 8253 - protein, 16 aa, Artificial Sequence
  source: /note="Description of Artificial Sequence: Synthetic peptide"
  MOD_RES (12)..(12): Citrulline
AEKLYKSEKYGXGFID

SEQ ID NO: 8254 - protein, 16 aa, Artificial Sequence
  source: /note="Description of Artificial Sequence: Synthetic peptide"
  MOD_RES (8)..(8): Citrulline
  MOD_RES (13)..(13): Citrulline
YKSEKYGXGFIDXLDL

SEQ ID NO: 8255 - protein, 16 aa, Artificial Sequence
  source: /note="Description of Artificial Sequence: Synthetic peptide"
  MOD_RES (6)..(6): Citrulline
INKETXGKIPKLFDEI

SEQ ID NO: 8256 - protein, 16 aa, Artificial Sequence
  source: /note="Description of Artificial Sequence: Synthetic peptide"
  MOD_RES (2)..(2): Citrulline
TXGKIPKLFDEINPET

SEQ ID NO: 8257 - protein, 16 aa, Artificial Sequence
  source: /note="Description of Artificial Sequence: Synthetic peptide"
  MOD_RES (6)..(6): Citrulline
MHWVVXGKKDLMLEES

SEQ ID NO: 8258 - protein, 16 aa, Artificial Sequence
  source: /note="Description of Artificial Sequence: Synthetic peptide"
  MOD_RES (10)..(10): Citrulline
  MOD_RES (13)..(13): Citrulline
GDGLSSFDSXGSXPTT

SEQ ID NO: 8259 - protein, 16 aa, Artificial Sequence
  source: /note="Description of Artificial Sequence: Synthetic peptide"
  MOD_RES (6)..(6): Citrulline
  MOD_RES (9)..(9): Citrulline
SSFDSXGSXPTTETEF

SEQ ID NO: 8260 - protein, 16 aa, Artificial Sequence
  source: /note="Description of Artificial Sequence: Synthetic peptide"
  MOD_RES (1)..(1): Citrulline
  MOD_RES (11)..(11): Citrulline
XNTEAVTLNFXGEKLA

SEQ ID NO: 8261 - protein, 16 aa, Artificial Sequence
  source: /note="Description of Artificial Sequence: Synthetic peptide"
  MOD_RES (7)..(7): Citrulline
AVTLNFXGEKLAKVMG

SEQ ID NO: 8262 - protein, 16 aa, Artificial Sequence
  source: /note="Description of Artificial Sequence: Synthetic peptide"
  MOD_RES (3)..(3): Citrulline
NFXGEKLAKVMGFLAD

SEQ ID NO: 8263 - protein, 16 aa, Artificial Sequence
  source: /note="Description of Artificial Sequence: Synthetic peptide"
  MOD_RES (10)..(10): Citrulline
SSQGKSIGGXGHKISD

SEQ ID NO: 8264 - protein, 16 aa, Artificial Sequence
  source: /note="Description of Artificial Sequence: Synthetic peptide"
  MOD_RES (6)..(6): Citrulline
KSIGGXGHKISDYFEY

SEQ ID NO: 8265 - protein, 16 aa, Artificial Sequence
  source: /note="Description of Artificial Sequence: Synthetic peptide"
  MOD_RES (2)..(2): Citrulline
GXGHKISDYFEYQGGN

SEQ ID NO: 8266 - protein, 16 aa, Artificial Sequence
  source: /note="Description of Artificial Sequence: Synthetic peptide"
  MOD_RES (3)..(3): Citrulline
  MOD_RES (9)..(9): Citrulline
PQXTVISWXGAVIEPE

SEQ ID NO: 8267 - protein, 16 aa, Artificial Sequence
  source: /note="Description of Artificial Sequence: Synthetic peptide"
  MOD_RES (5)..(5): Citrulline
VISWXGAVIEPEQGTE

SEQ ID NO: 8268 - protein, 16 aa, Artificial Sequence
  source: /note="Description of Artificial Sequence: Synthetic peptide"
  MOD_RES (10)..(10): Citrulline
VGTEGPAASXGGPKVV

SEQ ID NO: 8269 - protein, 16 aa, Artificial Sequence
  source: /note="Description of Artificial Sequence: Synthetic peptide"
  MOD_RES (6)..(6): Citrulline
GPAASXGGPKVVFGNS

SEQ ID NO: 8270 - protein, 16 aa, Artificial Sequence
  source: /note="Description of Artificial Sequence: Synthetic peptide"
  MOD_RES (2)..(2): Citrulline
SXGGPKVVFGNSWDSD

SEQ ID NO: 8271 - protein, 16 aa, Artificial Sequence
  source: /note="Description of Artificial Sequence: Synthetic peptide"
  MOD_RES (11)..(11): Citrulline
VFKDDEEPKGXGAPHL

SEQ ID NO: 8272 - protein, 16 aa, Artificial Sequence
  source: /note="Description of Artificial Sequence: Synthetic peptide"
  MOD_RES (1)..(1): Citrulline
  MOD_RES (12)..(12): Citrulline
XGGYMEVVQIPXGSVH

SEQ ID NO: 8273 - protein, 16 aa, Artificial Sequence
  source: /note="Description of Artificial Sequence: Synthetic peptide"
  MOD_RES (9)..(9): Citrulline
CAGLWEGGXGSCQGDS

SEQ ID NO: 8274 - protein, 16 aa, Artificial Sequence
  source: /note="Description of Artificial Sequence: Synthetic peptide"
  MOD_RES (5)..(5): Citrulline
WEGGXGSCQGDSGGPL

SEQ ID NO: 8275 - protein, 16 aa, Artificial Sequence
  source: /note="Description of Artificial Sequence: Synthetic peptide"
  MOD_RES (6)..(6): Citrulline
  MOD_RES (9)..(9): Citrulline
LADWAXKWXGTVEKGP

SEQ ID NO: 8276 - protein, 16 aa, Artificial Sequence
  source: /note="Description of Artificial Sequence: Synthetic peptide"
  MOD_RES (2)..(2): Citrulline
  MOD_RES (5)..(5): Citrulline
AXKWXGTVEKGPQYGT

SEQ ID NO: 8277 - protein, 16 aa, Artificial Sequence
  source: /note="Description of Artificial Sequence: Synthetic peptide"
  MOD_RES (7)..(7): Citrulline
  MOD_RES (11)..(11): Citrulline
WPLPEYXKSKXGSSFL

SEQ ID NO: 8278 - protein, 16 aa, Artificial Sequence
  source: /note="Description of Artificial Sequence: Synthetic peptide"
  MOD_RES (3)..(3): Citrulline
  MOD_RES (7)..(7): Citrulline
EYXKSKXGSSFLAGEA

SEQ ID NO: 8279 - protein, 16 aa, Artificial Sequence
  source: /note="Description of Artificial Sequence: Synthetic peptide"
  MOD_RES (4)..(4): Citrulline
  MOD_RES (10)..(10): Citrulline
KHPXTSGGTXGVLSGN

SEQ ID NO: 8280 - protein, 16 aa, Artificial Sequence
  source: /note="Description of Artificial Sequence: Synthetic peptide"
  MOD_RES (6)..(6): Citrulline
  MOD_RES (13)..(13): Citrulline
TSGGTXGVLSGNXGVE

SEQ ID NO: 8281 - protein, 16 aa, Artificial Sequence
  source: /note="Description of Artificial Sequence: Synthetic peptide"
  MOD_RES (2)..(2): Citrulline
  MOD_RES (9)..(9): Citrulline
TXGVLSGNXGVEYGSG

SEQ ID NO: 8282 - protein, 16 aa, Artificial Sequence
  source: /note="Description of Artificial Sequence: Synthetic peptide"
  MOD_RES (5)..(5): Citrulline
  MOD_RES (13)..(13): Citrulline
LSGNXGVEYGSGXGHL

SEQ ID NO: 8283 - protein, 16 aa, Artificial Sequence
  source: /note="Description of Artificial Sequence: Synthetic peptide"
  MOD_RES (1)..(1): Citrulline
  MOD_RES (9)..(9): Citrulline
XGVEYGSGXGHLGTFE

SEQ ID NO: 8284 - protein, 16 aa, Artificial Sequence
  source: /note="Description of Artificial Sequence: Synthetic peptide"
  MOD_RES (11)..(11): Citrulline
  MOD_RES (14)..(14): Citrulline
EPSEVEDFEAXGSXFS

SEQ ID NO: 8285 - protein, 16 aa, Artificial Sequence
  source: /note="Description of Artificial Sequence: Synthetic peptide"
  MOD_RES (7)..(7): Citrulline
  MOD_RES (10)..(10): Citrulline
VEDFEAXGSXFSKSAD

SEQ ID NO: 8286 - protein, 16 aa, Artificial Sequence
  source: /note="Description of Artificial Sequence: Synthetic peptide"
  MOD_RES (9)..(9): Citrulline
EALVSQLSXGKQAFTQ

SEQ ID NO: 8287 - protein, 16 aa, Artificial Sequence
  source: /note="Description of Artificial Sequence: Synthetic peptide"
  MOD_RES (5)..(5): Citrulline
SQLSXGKQAFTQQIEE

SEQ ID NO: 8288 - protein, 16 aa, Artificial Sequence
  source: /note="Description of Artificial Sequence: Synthetic peptide"
  MOD_RES (9)..(10): Citrulline
VAVLGYYNXXGINPET

SEQ ID NO: 8289 - protein, 16 aa, Artificial Sequence
  source: /note="Description of Artificial Sequence: Synthetic peptide"
  MOD_RES (5)..(6): Citrulline
GYYNXXGINPETFLNE

SEQ ID NO: 8290 - protein, 16 aa, Artificial Sequence
  source: /note="Description of Artificial Sequence: Synthetic peptide"
  MOD_RES (3)..(3): Citrulline
  MOD_RES (12)..(12): Citrulline
NNXSLTIHQAMXGQQI

SEQ ID NO: 8291 - protein, 16 aa, Artificial Sequence
  source: /note="Description of Artificial Sequence: Synthetic peptide"
  MOD_RES (8)..(8): Citrulline
LTIHQAMXGQQIGSYF

SEQ ID NO: 8292 - protein, 16 aa, Artificial Sequence
  source: /note="Description of Artificial Sequence: Synthetic peptide"
  MOD_RES (9)..(9): Citrulline
  MOD_RES (12)..(12): Citrulline
SIIAVAMQXGAXLPAE

SEQ ID NO: 8293 - protein, 16 aa, Artificial Sequence
  source: /note="Description of Artificial Sequence: Synthetic peptide"
  MOD_RES (5)..(5): Citrulline
  MOD_RES (8)..(8): Citrulline
VAMQXGAXLPAEVAGL

SEQ ID NO: 8294 - protein, 16 aa, Artificial Sequence
  source: /note="Description of Artificial Sequence: Synthetic peptide"
  MOD_RES (6)..(6): Citrulline
  MOD_RES (10)..(10): Citrulline
PDHALXMWIXGMKSEH

SEQ ID NO: 8295 - protein, 16 aa, Artificial Sequence
  source: /note="Description of Artificial Sequence: Synthetic peptide"
  MOD_RES (2)..(2): Citrulline
  MOD_RES (6)..(6): Citrulline
LXMWIXGMKSEHSSCL

SEQ ID NO: 8296 - protein, 16 aa, Artificial Sequence
  source: /note="Description of Artificial Sequence: Synthetic peptide"
  MOD_RES (8)..(8): Citrulline
GLVTFIQXGTWNEKME

SEQ ID NO: 8297 - protein, 16 aa, Artificial Sequence
  source: /note="Description of Artificial Sequence: Synthetic peptide"
  MOD_RES (4)..(4): Citrulline
FIQXGTWNEKMEYDQS

SEQ ID NO: 8298 - protein, 16 aa, Artificial Sequence
  source: /note="Description of Artificial Sequence: Synthetic peptide"
  MOD_RES (10)..(10): Citrulline
GTPLAVFSSXGQVIKE

SEQ ID NO: 8299 - protein, 16 aa, Artificial Sequence
  source: /note="Description of Artificial Sequence: Synthetic peptide"
  MOD_RES (6)..(6): Citrulline
AVFSSXGQVIKEILYT

SEQ ID NO: 8300 - protein, 16 aa, Artificial Sequence
  source: /note="Description of Artificial Sequence: Synthetic peptide"
  MOD_RES (2)..(2): Citrulline
SXGQVIKEILYTPYGD

SEQ ID NO: 8301 - protein, 16 aa, Artificial Sequence
  source: /note="Description of Artificial Sequence: Synthetic peptide"
  MOD_RES (13)..(13): Citrulline
SEKATFASVTYPXGYP

SEQ ID NO: 8302 - protein, 16 aa, Artificial Sequence
  source: /note="Description of Artificial Sequence: Synthetic peptide"
  MOD_RES (9)..(9): Citrulline
TFASVTYPXGYPYNGT

SEQ ID NO: 8303 - protein, 16 aa, Artificial Sequence
  source: /note="Description of Artificial Sequence: Synthetic peptide"
  MOD_RES (9)..(9): Citrulline
PGPTMSYYXGQEVLAP

SEQ ID NO: 8304 - protein, 16 aa, Artificial Sequence
  source: /note="Description of Artificial Sequence: Synthetic peptide"
  MOD_RES (5)..(5): Citrulline
MSYYXGQEVLAPGAGW

SEQ ID NO: 8305 - protein, 16 aa, Artificial Sequence
  source: /note="Description of Artificial Sequence: Synthetic peptide"
  MOD_RES (12)..(12): Citrulline
IATPNQGVWDMXGKQF

SEQ ID NO: 8306 - protein, 16 aa, Artificial Sequence
  source: /note="Description of Artificial Sequence: Synthetic peptide"
  MOD_RES (8)..(8): Citrulline
NQGVWDMXGKQFYNGI

SEQ ID NO: 8307 - protein, 16 aa, Artificial Sequence
  source: /note="Description of Artificial Sequence: Synthetic peptide"
  MOD_RES (4)..(4): Citrulline
WDMXGKQFYNGIEIKV

SEQ ID NO: 8308 - protein, 16 aa, Artificial Sequence
  source: /note="Description of Artificial Sequence: Synthetic peptide"
  MOD_RES (3)..(3): Citrulline
  MOD_RES (12)..(12): Citrulline
PAXGPKVSFSCXGAAS

SEQ ID NO: 8309 - protein, 16 aa, Artificial Sequence
  source: /note="Description of Artificial Sequence: Synthetic peptide"
  MOD_RES (8)..(8): Citrulline
PKVSFSCXGAASGPAP

SEQ ID NO: 8310 - protein, 16 aa, Artificial Sequence
  source: /note="Description of Artificial Sequence: Synthetic peptide"
  MOD_RES (8)..(8): Citrulline
AGPAGEPXGSQASFMQ

SEQ ID NO: 8311 - protein, 16 aa, Artificial Sequence
  source: /note="Description of Artificial Sequence: Synthetic peptide"
  MOD_RES (4)..(4): Citrulline
  MOD_RES (13)..(13): Citrulline
GEPXGSQASFMQXQFG

SEQ ID NO: 8312 - protein, 16 aa, Artificial Sequence
  source: /note="Description of Artificial Sequence: Synthetic peptide"
  MOD_RES (10)..(11): Citrulline
TTTLATSTAXXGKPPT

SEQ ID NO: 8313 - protein, 16 aa, Artificial Sequence
  source: /note="Description of Artificial Sequence: Synthetic peptide"
  MOD_RES (6)..(7): Citrulline
ATSTAXXGKPPTKEPI

SEQ ID NO: 8314 - protein, 16 aa, Artificial Sequence
  source: /note="Description of Artificial Sequence: Synthetic peptide"
  MOD_RES (9)..(9): Citrulline
  MOD_RES (11)..(11): Citrulline
GFHVVLVTXGXTTNEQ

SEQ ID NO: 8315 - protein, 16 aa, Artificial Sequence
  source: /note="Description of Artificial Sequence: Synthetic peptide"
  MOD_RES (5)..(5): Citrulline
  MOD_RES (7)..(7): Citrulline
VLVTXGXTTNEQVTGK

SEQ ID NO: 8316 - protein, 16 aa, Artificial Sequence
  source: /note="Description of Artificial Sequence: Synthetic peptide"
  MOD_RES (6)..(6): Citrulline
  MOD_RES (14)..(14): Citrulline
VTGKFXGGVNPFTXGC

SEQ ID NO: 8317 - protein, 16 aa, Artificial Sequence
  source: /note="Description of Artificial Sequence: Synthetic peptide"
  MOD_RES (2)..(2): Citrulline
  MOD_RES (10)..(10): Citrulline
FXGGVNPFTXGCCGNV

SEQ ID NO: 8318 - protein, 16 aa, Artificial Sequence
  source: /note="Description of Artificial Sequence: Synthetic peptide"
  MOD_RES (10)..(10): Citrulline
  MOD_RES (13)..(13): Citrulline
KTPVNWKDSXGTXVAV

SEQ ID NO: 8319 - protein, 16 aa, Artificial Sequence
  source: /note="Description of Artificial Sequence: Synthetic peptide"
  MOD_RES (6)..(6): Citrulline
  MOD_RES (9)..(9): Citrulline
NWKDSXGTXVAVSSPM

SEQ ID NO: 8320 - protein, 16 aa, Artificial Sequence
  source: /note="Description of Artificial Sequence: Synthetic peptide"
  MOD_RES (13)..(13): Citrulline
CASTLTVSSGSSXGSL

SEQ ID NO: 8321 - protein, 16 aa, Artificial Sequence
  source: /note="Description of Artificial Sequence: Synthetic peptide"
  MOD_RES (9)..(9): Citrulline
  MOD_RES (16)..(16): Citrulline
LTVSSGSSXGSLASSX

SEQ ID NO: 8322 - protein, 16 aa, Artificial Sequence
  source: /note="Description of Artificial Sequence: Synthetic peptide"
  MOD_RES (5)..(5): Citrulline
  MOD_RES (12)..(12): Citrulline
SGSSXGSLASSXGSLA

SEQ ID NO: 8323 - protein, 16 aa, Artificial Sequence
  source: /note="Description of Artificial Sequence: Synthetic peptide"
  MOD_RES (4)..(4): Citrulline
  MOD_RES (11)..(11): Citrulline
ASSXGSLASSXGSLSS

SEQ ID NO: 8324 - protein, 16 aa, Artificial Sequence
  source: /note="Description of Artificial Sequence: Synthetic peptide"
  MOD_RES (9)..(9): Citrulline
ASKEIYQLXGQSHKEP

SEQ ID NO: 8325 - protein, 16 aa, Artificial Sequence
  source: /note="Description of Artificial Sequence: Synthetic peptide"
  MOD_RES (5)..(5): Citrulline
IYQLXGQSHKEPIQVQ

SEQ ID NO: 8326 - protein, 16 aa, Artificial Sequence
  source: /note="Description of Artificial Sequence: Synthetic peptide"
  MOD_RES (3)..(3): Citrulline
  MOD_RES (10)..(10): Citrulline
DGXKSFLMKXGDVIDY

SEQ ID NO: 8327 - protein, 16 aa, Artificial Sequence
  source: /note="Description of Artificial Sequence: Synthetic peptide"
  MOD_RES (6)..(6): Citrulline
SFLMKXGDVIDYSSSG

SEQ ID NO: 8328 - protein, 16 aa, Artificial Sequence
  source: /note="Description of Artificial Sequence: Synthetic peptide"
  MOD_RES (2)..(2): Citrulline
KXGDVIDYSSSGVSTN

SEQ ID NO: 8329 - protein, 16 aa, Artificial Sequence
  source: /note="Description of Artificial Sequence: Synthetic peptide"
  MOD_RES (6)..(6): Citrulline
  MOD_RES (11)..(11): Citrulline
SGLSLXSHPLXGEKKG

SEQ ID NO: 8330 - protein, 16 aa, Artificial Sequence
  source: /note="Description of Artificial Sequence: Synthetic peptide"
  MOD_RES (2)..(2): Citrulline
  MOD_RES (7)..(7): Citrulline
LXSHPLXGEKKGDGDL

SEQ ID NO: 8331 - protein, 16 aa, Artificial Sequence
  source: /note="Description of Artificial Sequence: Synthetic peptide"
  MOD_RES (11)..(11): Citrulline
SIAGISYGQVXGTAIE

SEQ ID NO: 8332 - protein, 16 aa, Artificial Sequence
  source: /note="Description of Artificial Sequence: Synthetic peptide"
  MOD_RES (7)..(7): Citrulline
  MOD_RES (14)..(14): Citrulline
ISYGQVXGTAIEQXTS

SEQ ID NO: 8333 - protein, 16 aa, Artificial Sequence
  source: /note="Description of Artificial Sequence: Synthetic peptide"
  MOD_RES (11)..(11): Citrulline
KPHPPPPPATXGTSTY

SEQ ID NO: 8334 - protein, 16 aa, Artificial Sequence
  source: /note="Description of Artificial Sequence: Synthetic peptide"
  MOD_RES (7)..(7): Citrulline
PPPPATXGTSTYPTDF

SEQ ID NO: 8335 - protein, 16 aa, Artificial Sequence
  source: /note="Description of Artificial Sequence: Synthetic peptide"
  MOD_RES (9)..(9): Citrulline
  MOD_RES (12)..(12): Citrulline
DGAQASPAXGGXKPSP

SEQ ID NO: 8336 - protein, 16 aa, Artificial Sequence
  source: /note="Description of Artificial Sequence: Synthetic peptide"
  MOD_RES (5)..(5): Citrulline
  MOD_RES (8)..(8): Citrulline
ASPAXGGXKPSPPEAA

SEQ ID NO: 8337 - protein, 16 aa, Artificial Sequence
  source: /note="Description of Artificial Sequence: Synthetic peptide"
  MOD_RES (3)..(3): Citrulline
  MOD_RES (11)..(11): Citrulline
CAXLGQSPPGXGGLFE

SEQ ID NO: 8338 - protein, 16 aa, Artificial Sequence
  source: /note="Description of Artificial Sequence: Synthetic peptide"
  MOD_RES (7)..(7): Citrulline
GQSPPGXGGLFEDPWL

SEQ ID NO: 8339 - protein, 16 aa, Artificial Sequence
  source: /note="Description of Artificial Sequence: Synthetic peptide"
  MOD_RES (9)..(9): Citrulline
PPVGGGKGXGLVAGGS

SEQ ID NO: 8340 - protein, 16 aa, Artificial Sequence
  source: /note="Description of Artificial Sequence: Synthetic peptide"
  MOD_RES (5)..(5): Citrulline
  MOD_RES (13)..(13): Citrulline
GGKGXGLVAGGSXALG

SEQ ID NO: 8341 - protein, 16 aa, Artificial Sequence
  source: /note="Description of Artificial Sequence: Synthetic peptide"
  MOD_RES (10)..(10): Citrulline
GPSVGAKAGXGTVMGT

SEQ ID NO: 8342 - protein, 16 aa, Artificial Sequence
  source: /note="Description of Artificial Sequence: Synthetic peptide"
  MOD_RES (10)..(10): Citrulline
  MOD_RES (15)..(15): Citrulline
SGPISSSVGXGHKIXS

SEQ ID NO: 8343 - protein, 16 aa, Artificial Sequence
  source: /note="Description of Artificial Sequence: Synthetic peptide"
  MOD_RES (6)..(6): Citrulline
  MOD_RES (11)..(11): Citrulline
SSSVGXGHKIXSTSQG

SEQ ID NO: 8344 - protein, 16 aa, Artificial Sequence
  source: /note="Description of Artificial Sequence: Synthetic peptide"
  MOD_RES (2)..(2): Citrulline
  MOD_RES (7)..(7): Citrulline
GXGHKIXSTSQGLLDA

SEQ ID NO: 8345 - protein, 16 aa, Artificial Sequence
  source: /note="Description of Artificial Sequence: Synthetic peptide"
  MOD_RES (8)..(8): Citrulline
GVFAAGPXGTQAALCA

SEQ ID NO: 8346 - protein, 16 aa, Artificial Sequence
  source: /note="Description of Artificial Sequence: Synthetic peptide"
  MOD_RES (4)..(4): Citrulline
AGPXGTQAALCAFPMV

SEQ ID NO: 8347 - protein, 16 aa, Artificial Sequence
  source: /note="Description of Artificial Sequence: Synthetic peptide"
  MOD_RES (12)..(12): Citrulline
GPQAGGTQLTIXGQHL

SEQ ID NO: 8348 - protein, 16 aa, Artificial Sequence
  source: /note="Description of Artificial Sequence: Synthetic peptide"
  MOD_RES (8)..(8): Citrulline
GGTQLTIXGQHLQTGG

SEQ ID NO: 8349 - protein, 16 aa, Artificial Sequence
  source: /note="Description of Artificial Sequence: Synthetic peptide"
  MOD_RES (4)..(4): Citrulline
LTIXGQHLQTGGNTSA

SEQ ID NO: 8350 - protein, 16 aa, Artificial Sequence
  source: /note="Description of Artificial Sequence: Synthetic peptide"
  MOD_RES (10)..(10): Citrulline
TVGLVPQLHXGSTISQ

SEQ ID NO: 8351 - protein, 16 aa, Artificial Sequence
  source: /note="Description of Artificial Sequence: Synthetic peptide"
  MOD_RES (6)..(6): Citrulline
VPQLHXGSTISQSLAQ

SEQ ID NO: 8352 - protein, 16 aa, Artificial Sequence
  source: /note="Description of Artificial Sequence: Synthetic peptide"
  MOD_RES (11)..(11): Citrulline
SWGEGLVTAQXGMLPG

SEQ ID NO: 8353 - protein, 16 aa, Artificial Sequence
  source: /note="Description of Artificial Sequence: Synthetic peptide"
  MOD_RES (7)..(7): Citrulline
GLVTAQXGMLPGTKTS

SEQ ID NO: 8354 - protein, 16 aa, Artificial Sequence
  source: /note="Description of Artificial Sequence: Synthetic peptide"
  MOD_RES (8)..(8): Citrulline
  MOD_RES (12)..(12): Citrulline
TSGLGSPXAIKXGVSM

SEQ ID NO: 8355 - protein, 16 aa, Artificial Sequence
  source: /note="Description of Artificial Sequence: Synthetic peptide"
  MOD_RES (4)..(4): Citrulline
  MOD_RES (8)..(8): Citrulline
GSPXAIKXGVSMSSLS

SEQ ID NO: 8356 - protein, 16 aa, Artificial Sequence
  source: /note="Description of Artificial Sequence: Synthetic peptide"
  MOD_RES (4)..(4): Citrulline
  MOD_RES (9)..(9): Citrulline
TLTXAASLXGGVGAPG

SEQ ID NO: 8357 - protein, 16 aa, Artificial Sequence
  source: /note="Description of Artificial Sequence: Synthetic peptide"
  MOD_RES (6)..(7): Citrulline
LPLNIXXGGSDTNLNF

SEQ ID NO: 8358 - protein, 16 aa, Artificial Sequence
  source: /note="Description of Artificial Sequence: Synthetic peptide"
  MOD_RES (8)..(9): Citrulline
MPGGGGNXXGSPSAAF

SEQ ID NO: 8359 - protein, 16 aa, Artificial Sequence
  source: /note="Description of Artificial Sequence: Synthetic peptide"
  MOD_RES (4)..(5): Citrulline
GGNXXGSPSAAFTFPD

SEQ ID NO: 8360 - protein, 16 aa, Artificial Sequence
  source: /note="Description of Artificial Sequence: Synthetic peptide"
  MOD_RES (11)..(11): Citrulline
  MOD_RES (13)..(13): Citrulline
FPTSHSVLYMXGXLAE

SEQ ID NO: 8361 - protein, 16 aa, Artificial Sequence
  source: /note="Description of Artificial Sequence: Synthetic peptide"
  MOD_RES (7)..(7): Citrulline
  MOD_RES (9)..(9): Citrulline
HSVLYMXGXLAEVKGN

SEQ ID NO: 8362 - protein, 16 aa, Artificial Sequence
  source: /note="Description of Artificial Sequence: Synthetic peptide"
  MOD_RES (6)..(6): Citrulline
  MOD_RES (8)..(8): Citrulline
LEKLQXAXGQVKPSTS

SEQ ID NO: 8363 - protein, 16 aa, Artificial Sequence
  source: /note="Description of Artificial Sequence: Synthetic peptide"
  MOD_RES (2)..(2): Citrulline
  MOD_RES (4)..(4): Citrulline
QXAXGQVKPSTSSQPI

SEQ ID NO: 8364 - protein, 16 aa, Artificial Sequence
  source: /note="Description of Artificial Sequence: Synthetic peptide"
  MOD_RES (4)..(4): Citrulline
  MOD_RES (9)..(9): Citrulline
KHEXVKVPXGESLMEW

SEQ ID NO: 8365 - protein, 16 aa, Artificial Sequence
  source: /note="Description of Artificial Sequence: Synthetic peptide"
  MOD_RES (5)..(5): Citrulline
VKVPXGESLMEWAENV

SEQ ID NO: 8366 - protein, 16 aa, Artificial Sequence
  source: /note="Description of Artificial Sequence: Synthetic peptide"
  MOD_RES (11)..(11): Citrulline
  MOD_RES (14)..(14): Citrulline
SNMSKLIYESXGDXDL

SEQ ID NO: 8367 - protein, 16 aa, Artificial Sequence
  source: /note="Description of Artificial Sequence: Synthetic peptide"
  MOD_RES (7)..(7): Citrulline
  MOD_RES (10)..(10): Citrulline
KLIYESXGDXDLHCTE

SEQ ID NO: 8368 - protein, 16 aa, Artificial Sequence
  source: /note="Description of Artificial Sequence: Synthetic peptide"
  MOD_RES (7)..(7): Citrulline
  MOD_RES (15)..(15): Citrulline
SSKEPQXGMGYMPKXG

SEQ ID NO: 8369 - protein, 16 aa, Artificial Sequence
  source: /note="Description of Artificial Sequence: Synthetic peptide"
  MOD_RES (3)..(3): Citrulline
  MOD_RES (11)..(11): Citrulline
PQXGMGYMPKXGLDVN

SEQ ID NO: 8370 - protein, 16 aa, Artificial Sequence
  source: /note="Description of Artificial Sequence: Synthetic peptide"
  MOD_RES (11)..(12): Citrulline
QIEPFCLETDXXGALK

SEQ ID NO: 8371 - protein, 16 aa, Artificial Sequence
  source: /note="Description of Artificial Sequence: Synthetic peptide"
  MOD_RES (7)..(8): Citrulline
FCLETDXXGALKAQTW

SEQ ID NO: 8372 - protein, 16 aa, Artificial Sequence
  source: /note="Description of Artificial Sequence: Synthetic peptide"
  MOD_RES (3)..(4): Citrulline
TDXXGALKAQTWKHQL

SEQ ID NO: 8373 - protein, 16 aa, Artificial Sequence
  source: /note="Description of Artificial Sequence: Synthetic peptide"
  MOD_RES (10)..(10): Citrulline
MGPDFGYVTXGPQTGG

SEQ ID NO: 8374 - protein, 16 aa, Artificial Sequence
  source: /note="Description of Artificial Sequence: Synthetic peptide"
  MOD_RES (6)..(6): Citrulline
FGYVTXGPQTGGISGL

SEQ ID NO: 8375 - protein, 16 aa, Artificial Sequence
  source: /note="Description of Artificial Sequence: Synthetic peptide"
  MOD_RES (10)..(10): Citrulline
FICALSVTSXGSFEQK

SEQ ID NO: 8376 - protein, 16 aa, Artificial Sequence
  source: /note="Description of Artificial Sequence: Synthetic peptide"
  MOD_RES (6)..(6): Citrulline
LSVTSXGSFEQKLNWA

SEQ ID NO: 8377 - protein, 16 aa, Artificial Sequence
  source: /note="Description of Artificial Sequence: Synthetic peptide"
  MOD_RES (6)..(6): Citrulline
  MOD_RES (8)..(8): Citrulline
GPQGPXGXGKKLTLAC

SEQ ID NO: 8378 - protein, 16 aa, Artificial Sequence
  source: /note="Description of Artificial Sequence: Synthetic peptide"
  MOD_RES (2)..(2): Citrulline
  MOD_RES (4)..(4): Citrulline
PXGXGKKLTLACPGPL

SEQ ID NO: 8379 - protein, 16 aa, Artificial Sequence
  source: /note="Description of Artificial Sequence: Synthetic peptide"
  MOD_RES (12)..(12): Citrulline
QMAKEMSEFLSXGPAV

SEQ ID NO: 8380 - protein, 16 aa, Artificial Sequence
  source: /note="Description of Artificial Sequence: Synthetic peptide"
  MOD_RES (8)..(8): Citrulline
EMSEFLSXGPAVLATK

SEQ ID NO: 8381 - protein, 16 aa, Artificial Sequence
  source: /note="Description of Artificial Sequence: Synthetic peptide"
  MOD_RES (4)..(4): Citrulline
FLSXGPAVLATKAAAG

SEQ ID NO: 8382 - protein, 16 aa, Artificial Sequence
  source: /note="Description of Artificial Sequence: Synthetic peptide"
  MOD_RES (3)..(3): Citrulline
  MOD_RES (9)..(9): Citrulline
AEXSKEMPXGSFLLLN

SEQ ID NO: 8383 - protein, 16 aa, Artificial Sequence
  source: /note="Description of Artificial Sequence: Synthetic peptide"
  MOD_RES (5)..(5): Citrulline
KEMPXGSFLLLNTSAD

SEQ ID NO: 8384 - protein, 16 aa, Artificial Sequence
  source: /note="Description of Artificial Sequence: Synthetic peptide"
  MOD_RES (14)..(14): Citrulline
SCPQAMKKWGWETXGG

SEQ ID NO: 8385 - protein, 16 aa, Artificial Sequence
  source: /note="Description of Artificial Sequence: Synthetic peptide"
  MOD_RES (10)..(10): Citrulline
AMKKWGWETXGGFGGG

SEQ ID NO: 8386 - protein, 16 aa, Artificial Sequence
  source: /note="Description of Artificial Sequence: Synthetic peptide"
  MOD_RES (13)..(13): Citrulline
PPASPSNGPALLXGTY

SEQ ID NO: 8387 - protein, 16 aa, Artificial Sequence
  source: /note="Description of Artificial Sequence: Synthetic peptide"
  MOD_RES (9)..(9): Citrulline
PSNGPALLXGTYFSTQ

SEQ ID NO: 8388 - protein, 16 aa, Artificial Sequence
  source: /note="Description of Artificial Sequence: Synthetic peptide"
  MOD_RES (5)..(5): Citrulline
PALLXGTYFSTQDDVD

SEQ ID NO: 8389 - protein, 16 aa, Artificial Sequence
  source: /note="Description of Artificial Sequence: Synthetic peptide"
  MOD_RES (9)..(9): Citrulline
  MOD_RES (14)..(14): Citrulline
YEELLSLLXGSEFXGI

SEQ ID NO: 8390 - protein, 16 aa, Artificial Sequence
  source: /note="Description of Artificial Sequence: Synthetic peptide"
  MOD_RES (5)..(5): Citrulline
  MOD_RES (10)..(10): Citrulline
LSLLXGSEFXGIVGPP

SEQ ID NO: 8391 - protein, 16 aa, Artificial Sequence
  source: /note="Description of Artificial Sequence: Synthetic peptide"
  MOD_RES (1)..(1): Citrulline
  MOD_RES (6)..(6): Citrulline
XGSEFXGIVGPPGPPG

SEQ ID NO: 8392 - protein, 14 aa, Artificial Sequence
  source: /note="Description of Artificial Sequence: Synthetic peptide"
  MOD_RES (10)..(11): Citrulline
SSSSHSSSVXXGSS

SEQ ID NO: 8393 - protein, 15 aa, Artificial Sequence
  source: /note="Description of Artificial Sequence: Synthetic peptide"
  MOD_RES (6)..(7): Citrulline
HSSSVXXGSSYSSSM

SEQ ID NO: 8394 - protein, 16 aa, Artificial Sequence
  source: /note="Description of Artificial Sequence: Synthetic peptide"
  MOD_RES (2)..(3): Citrulline
VXXGSSYSSSMSTGGG

SEQ ID NO: 8395 - protein, 16 aa, Artificial Sequence
  source: /note="Description of Artificial Sequence: Synthetic peptide"
  MOD_RES (3)..(3): Citrulline
  MOD_RES (10)..(10): Citrulline
TYXCEATNPXGSAAKN

SEQ ID NO: 8396 - protein, 16 aa, Artificial Sequence
  source: /note="Description of Artificial Sequence: Synthetic peptide"
  MOD_RES (6)..(6): Citrulline
EATNPXGSAAKNVAVT

SEQ ID NO: 8397 - protein, 16 aa, Artificial Sequence
  source: /note="Description of Artificial Sequence: Synthetic peptide"
  MOD_RES (9)..(9): Citrulline
  MOD_RES (12)..(12): Citrulline
CKFCHVCGXKGXGSKH

SEQ ID NO: 8398 - protein, 16 aa, Artificial Sequence
  source: /note="Description of Artificial Sequence: Synthetic peptide"
  MOD_RES (5)..(5): Citrulline
  MOD_RES (8)..(8): Citrulline
HVCGXKGXGSKHLLEC

SEQ ID NO: 8399 - protein, 16 aa, Artificial Sequence
  source: /note="Description of Artificial Sequence: Synthetic peptide"
  MOD_RES (11)..(11): Citrulline
YPELKLAYAVXGNKLE

SEQ ID NO: 8400 - protein, 16 aa, Artificial Sequence
  source: /note="Description of Artificial Sequence: Synthetic peptide"
  MOD_RES (7)..(7): Citrulline
  MOD_RES (13)..(13): Citrulline
KLAYAVXGNKLEXGQK

SEQ ID NO: 8401 - protein, 16 aa, Artificial Sequence
  source: /note="Description of Artificial Sequence: Synthetic peptide"
  MOD_RES (3)..(3): Citrulline
  MOD_RES (9)..(9): Citrulline
AVXGNKLEXGQKISEQ

SEQ ID NO: 8402 - protein, 16 aa, Artificial Sequence
  source: /note="Description of Artificial Sequence: Synthetic peptide"
  MOD_RES (5)..(5): Citrulline
NKLEXGQKISEQIVIG

SEQ ID NO: 8403 - protein, 16 aa, Artificial Sequence
  source: /note="Description of Artificial Sequence: Synthetic peptide"
  MOD_RES (10)..(10): Citrulline
  MOD_RES (15)..(15): Citrulline
SFGLKTLLAXGAIVXC

SEQ ID NO: 8404 - protein, 16 aa, Artificial Sequence
  source: /note="Description of Artificial Sequence: Synthetic peptide"
  MOD_RES (6)..(6): Citrulline
  MOD_RES (11)..(11): Citrulline
KTLLAXGAIVXCPMAG

SEQ ID NO: 8405 - protein, 16 aa, Artificial Sequence
  source: /note="Description of Artificial Sequence: Synthetic peptide"
  MOD_RES (9)..(9): Citrulline
DLIDVDLIXGSTFAKA

SEQ ID NO: 8406 - protein, 16 aa, Artificial Sequence
  source: /note="Description of Artificial Sequence: Synthetic peptide"
  MOD_RES (5)..(5): Citrulline
VDLIXGSTFAKAKPEI

SEQ ID NO: 8407 - protein, 16 aa, Artificial Sequence
  source: /note="Description of Artificial Sequence: Synthetic peptide"
  MOD_RES (13)..(13): Citrulline
DSGLVDIEKKLNXGDK

SEQ ID NO: 8408 - protein, 16 aa, Artificial Sequence
  source: /note="Description of Artificial Sequence: Synthetic peptide"
  MOD_RES (9)..(9): Citrulline
VDIEKKLNXGDKMEML

SEQ ID NO: 8409 - protein, 16 aa, Artificial Sequence
  source: /note="Description of Artificial Sequence: Synthetic peptide"
  MOD_RES (5)..(5): Citrulline
KKLNXGDKMEMLPDTT

SEQ ID NO: 8410 - protein, 16 aa, Artificial Sequence
  source: /note="Description of Artificial Sequence: Synthetic peptide"
  MOD_RES (10)..(10): Citrulline
VTPPPDAFSXGVSSPI

SEQ ID NO: 8411 - protein, 16 aa, Artificial Sequence
  source: /note="Description of Artificial Sequence: Synthetic peptide"
  MOD_RES (6)..(6): Citrulline
PDAFSXGVSSPIAGPA

SEQ ID NO: 8412 - protein, 16 aa, Artificial Sequence
  source: /note="Description of Artificial Sequence: Synthetic peptide"
  MOD_RES (11)..(11): Citrulline
PSNELPGMSGXGAQLF

SEQ ID NO: 8413 - protein, 16 aa, Artificial Sequence
  source: /note="Description of Artificial Sequence: Synthetic peptide"
  MOD_RES (7)..(7): Citrulline
  MOD_RES (15)..(15): Citrulline
LPGMSGXGAQLFAKXQ

SEQ ID NO: 8414 - protein, 16 aa, Artificial Sequence
  source: /note="Description of Artificial Sequence: Synthetic peptide"
  MOD_RES (12)..(12): Citrulline
FDVTSGKEFYGXGAPY

SEQ ID NO: 8415 - protein, 16 aa, Artificial Sequence
  source: /note="Description of Artificial Sequence: Synthetic peptide"
  MOD_RES (8)..(8): Citrulline
SGKEFYGXGAPYNALT

SEQ ID NO: 8416 - protein, 16 aa, Artificial Sequence
  source: /note="Description of Artificial Sequence: Synthetic peptide"
  MOD_RES (4)..(4): Citrulline
FYGXGAPYNALTGKDS

SEQ ID NO: 8417 - protein, 16 aa, Artificial Sequence
  source: /note="Description of Artificial Sequence: Synthetic peptide"
  MOD_RES (10)..(10): Citrulline
NALTGKDSTXGVAKMS

SEQ ID NO: 8418 - protein, 16 aa, Artificial Sequence
  source: /note="Description of Artificial Sequence: Synthetic peptide"
  MOD_RES (6)..(6): Citrulline
GKDSTXGVAKMSLDPA

SEQ ID NO: 8419 - protein, 16 aa, Artificial Sequence
  source: /note="Description of Artificial Sequence: Synthetic peptide"
  MOD_RES (2)..(2): Citrulline
  MOD_RES (6)..(6): Citrulline
VXVVSXGNKLHLQLNQ

SEQ ID NO: 8420 - protein, 16 aa, Artificial Sequence
  source: /note="Description of Artificial Sequence: Synthetic peptide"
  MOD_RES (2)..(2): Citrulline
SXGNKLHLQLNQETAD

SEQ ID NO: 8421 - protein, 16 aa, Artificial Sequence
  source: /note="Description of Artificial Sequence: Synthetic peptide"
  MOD_RES (10)..(10): Citrulline
  MOD_RES (13)..(13): Citrulline
GLAEGELAAXGTXVVS

SEQ ID NO: 8422 - protein, 16 aa, Artificial Sequence
  source: /note="Description of Artificial Sequence: Synthetic peptide"
  MOD_RES (6)..(6): Citrulline
  MOD_RES (9)..(9): Citrulline
GELAAXGTXVVSDDNK

SEQ ID NO: 8423 - protein, 16 aa, Artificial Sequence
  source: /note="Description of Artificial Sequence: Synthetic peptide"
  MOD_RES (1)..(1): Citrulline
  MOD_RES (7)..(7): Citrulline
XAVCKFXGDLLEVNLQ

SEQ ID NO: 8424 - protein, 16 aa, Artificial Sequence
  source: /note="Description of Artificial Sequence: Synthetic peptide"
  MOD_RES (3)..(3): Citrulline
KFXGDLLEVNLQNGIL

SEQ ID NO: 8425 - protein, 16 aa, Artificial Sequence
  source: /note="Description of Artificial Sequence: Synthetic peptide"
  MOD_RES (1)..(1): Citrulline
  MOD_RES (7)..(7): Citrulline
XVASKGXGGLLEVNLQ

SEQ ID NO: 8426 - protein, 16 aa, Artificial Sequence
  source: /note="Description of Artificial Sequence: Synthetic peptide"
  MOD_RES (3)..(3): Citrulline
KGXGGLLEVNLQNGIL

SEQ ID NO: 8427 - protein, 16 aa, Artificial Sequence
  source: /note="Description of Artificial Sequence: Synthetic peptide"
  MOD_RES (5)..(5): Citrulline
  MOD_RES (16)..(16): Citrulline
GPPPXGGMAQKLGSGX

SEQ ID NO: 8428 - protein, 16 aa, Artificial Sequence
  source: /note="Description of Artificial Sequence: Synthetic peptide"
  MOD_RES (1)..(1): Citrulline
  MOD_RES (12)..(12): Citrulline
XGGMAQKLGSGXGTGQ

SEQ ID NO: 8429 - protein, 16 aa, Artificial Sequence
  source: /note="Description of Artificial Sequence: Synthetic peptide"
  MOD_RES (6)..(6): Citrulline
  MOD_RES (10)..(10): Citrulline
MNQEGXAVIXGSNTLV

SEQ ID NO: 8430 - protein, 16 aa, Artificial Sequence
  source: /note="Description of Artificial Sequence: Synthetic peptide"
  MOD_RES (2)..(2): Citrulline
  MOD_RES (6)..(6): Citrulline
GXAVIXGSNTLVENLY

SEQ ID NO: 8431 - protein, 16 aa, Artificial Sequence
  source: /note="Description of Artificial Sequence: Synthetic peptide"
  MOD_RES (10)..(11): Citrulline
ANTHILYNPXXGDVKL

SEQ ID NO: 8432 - protein, 16 aa, Artificial Sequence
  source: /note="Description of Artificial Sequence: Synthetic peptide"
  MOD_RES (6)..(7): Citrulline
ILYNPXXGDVKLAQMA

SEQ ID NO: 8433 - protein, 16 aa, Artificial Sequence
  source: /note="Description of Artificial Sequence: Synthetic peptide"
  MOD_RES (12)..(12): Citrulline
VADSKVGTQFIXGVSG

SEQ ID NO: 8434 - protein, 16 aa, Artificial Sequence
  source: /note="Description of Artificial Sequence: Synthetic peptide"
  MOD_RES (8)..(8): Citrulline
  MOD_RES (15)..(15): Citrulline
KVGTQFIXGVSGGEXK

SEQ ID NO: 8435 - protein, 16 aa, Artificial Sequence
  source: /note="Description of Artificial Sequence: Synthetic peptide"
  MOD_RES (8)..(8): Citrulline
SASTKHLXGDGLKDLN

SEQ ID NO: 8436 - protein, 16 aa, Artificial Sequence
  source: /note="Description of Artificial Sequence: Synthetic peptide"
  MOD_RES (4)..(4): Citrulline
KHLXGDGLKDLNETML

SEQ ID NO: 8437 - protein, 16 aa, Artificial Sequence
  source: /note="Description of Artificial Sequence: Synthetic peptide"
  MOD_RES (8)..(8): Citrulline
  MOD_RES (11)..(11): Citrulline
LHGLLQAXGSXDGGAS

SEQ ID NO: 8438 - protein, 16 aa, Artificial Sequence
  source: /note="Description of Artificial Sequence: Synthetic peptide"
  MOD_RES (4)..(4): Citrulline
  MOD_RES (7)..(7): Citrulline
LQAXGSXDGGASSTGS

SEQ ID NO: 8439 - protein, 16 aa, Artificial Sequence
  source: /note="Description of Artificial Sequence: Synthetic peptide"
  MOD_RES (9)..(9): Citrulline
  MOD_RES (12)..(12): Citrulline
KAAAFSYYXGDXNAMC

SEQ ID NO: 8440 - protein, 16 aa, Artificial Sequence
  source: /note="Description of Artificial Sequence: Synthetic peptide"
  MOD_RES (5)..(5): Citrulline
  MOD_RES (8)..(8): Citrulline
FSYYXGDXNAMCGLEE

SEQ ID NO: 8441 - protein, 16 aa, Artificial Sequence
  source: /note="Description of Artificial Sequence: Synthetic peptide"
  MOD_RES (2)..(2): Citrulline
  MOD_RES (10)..(10): Citrulline
HXFEPVLFQXGSQYEV

SEQ ID NO: 8442 - protein, 16 aa, Artificial Sequence
  source: /note="Description of Artificial Sequence: Synthetic peptide"
  MOD_RES (6)..(6): Citrulline
  MOD_RES (15)..(15): Citrulline
PVLFQXGSQYEVDYXH

SEQ ID NO: 8443 - protein, 16 aa, Artificial Sequence
  source: /note="Description of Artificial Sequence: Synthetic peptide"
  MOD_RES (10)..(10): Citrulline
  MOD_RES (15)..(15): Citrulline
LTLQWVYSAXGDYIXA

SEQ ID NO: 8444 - protein, 16 aa, Artificial Sequence
  source: /note="Description of Artificial Sequence: Synthetic peptide"
  MOD_RES (6)..(6): Citrulline
  MOD_RES (11)..(11): Citrulline
WVYSAXGDYIXAAEKL

SEQ ID NO: 8445 - protein, 16 aa, Artificial Sequence
  source: /note="Description of Artificial Sequence: Synthetic peptide"
  MOD_RES (6)..(6): Citrulline
  MOD_RES (14)..(14): Citrulline
WGDGIXGLSLSAAXYA

SEQ ID NO: 8446 - protein, 16 aa, Artificial Sequence
  source: /note="Description of Artificial Sequence: Synthetic peptide"
  MOD_RES (10)..(10): Citrulline
GGPSQPTGPXGLGSFE

SEQ ID NO: 8447 - protein, 16 aa, Artificial Sequence
  source: /note="Description of Artificial Sequence: Synthetic peptide"
  MOD_RES (2)..(2): Citrulline
  MOD_RES (12)..(12): Citrulline
VXYISAPEKTGXGESL

SEQ ID NO: 8448 - protein, 16 aa, Artificial Sequence
  source: /note="Description of Artificial Sequence: Synthetic peptide"
  MOD_RES (8)..(8): Citrulline
SAPEKTGXGESLACQT

SEQ ID NO: 8449 - protein, 16 aa, Artificial Sequence
  source: /note="Description of Artificial Sequence: Synthetic peptide"
  MOD_RES (4)..(4): Citrulline
KTGXGESLACQTEPDG

SEQ ID NO: 8450 - protein, 16 aa, Artificial Sequence
  source: /note="Description of Artificial Sequence: Synthetic peptide"
  MOD_RES (12)..(12): Citrulline
  MOD_RES (14)..(14): Citrulline
PPPAVSSSLVSXGXKF

SEQ ID NO: 8451 - protein, 16 aa, Artificial Sequence
  source: /note="Description of Artificial Sequence: Synthetic peptide"
  MOD_RES (8)..(8): Citrulline
  MOD_RES (10)..(10): Citrulline
VSSSLVSXGXKFQDEI

SEQ ID NO: 8452 - protein, 16 aa, Artificial Sequence
  source: /note="Description of Artificial Sequence: Synthetic peptide"
  MOD_RES (2)..(2): Citrulline
  MOD_RES (12)..(12): Citrulline
AXLQQQSQPTTXGSAP

SEQ ID NO: 8453 - protein, 16 aa, Artificial Sequence
  source: /note="Description of Artificial Sequence: Synthetic peptide"
  MOD_RES (8)..(8): Citrulline
QQSQPTTXGSAPAASQ

SEQ ID NO: 8454 - protein, 16 aa, Artificial Sequence
  source: /note="Description of Artificial Sequence: Synthetic peptide"
  MOD_RES (4)..(4): Citrulline
PTTXGSAPAASQPAGK

SEQ ID NO: 8455 - protein, 16 aa, Artificial Sequence
  source: /note="Description of Artificial Sequence: Synthetic peptide"
  MOD_RES (3)..(3): Citrulline
  MOD_RES (9)..(9): Citrulline
SSXLGSLVXGITALTS

SEQ ID NO: 8456 - protein, 16 aa, Artificial Sequence
  source: /note="Description of Artificial Sequence: Synthetic peptide"
  MOD_RES (9)..(9): Citrulline
  MOD_RES (11)..(11): Citrulline
LSEAEQTLXFXGALPD

SEQ ID NO: 8457 - protein, 16 aa, Artificial Sequence
  source: /note="Description of Artificial Sequence: Synthetic peptide"
  MOD_RES (5)..(5): Citrulline
  MOD_RES (7)..(7): Citrulline
EQTLXFXGALPDDTEA

SEQ ID NO: 8458 - protein, 16 aa, Artificial Sequence
  source: /note="Description of Artificial Sequence: Synthetic peptide"
  MOD_RES (1)..(1): Citrulline
  MOD_RES (3)..(3): Citrulline
XFXGALPDDTEALQSL

SEQ ID NO: 8459 - protein, 16 aa, Artificial Sequence
  source: /note="Description of Artificial Sequence: Synthetic peptide"
  MOD_RES (8)..(8): Citrulline
  MOD_RES (14)..(14): Citrulline
LEMMAPSXGSAKSXGP

SEQ ID NO: 8460 - protein, 16 aa, Artificial Sequence
  source: /note="Description of Artificial Sequence: Synthetic peptide"
  MOD_RES (4)..(4): Citrulline
  MOD_RES (10)..(10): Citrulline
APSXGSAKSXGPLEEL

SEQ ID NO: 8461 - protein, 16 aa, Artificial Sequence
  source: /note="Description of Artificial Sequence: Synthetic peptide"
  MOD_RES (12)..(12): Citrulline
  MOD_RES (15)..(15): Citrulline
EDGAWQGSQLAXGAXL

SEQ ID NO: 8462 - protein, 16 aa, Artificial Sequence
  source: /note="Description of Artificial Sequence: Synthetic peptide"
  MOD_RES (8)..(8): Citrulline
  MOD_RES (11)..(11): Citrulline
WQGSQLAXGAXLGQPP

SEQ ID NO: 8463 - protein, 16 aa, Artificial Sequence
  source: /note="Description of Artificial Sequence: Synthetic peptide"
  MOD_RES (7)..(7): Citrulline
  MOD_RES (15)..(15): Citrulline
TSSTGSXGSCGSSGXT

SEQ ID NO: 8464 - protein, 16 aa, Artificial Sequence
  source: /note="Description of Artificial Sequence: Synthetic peptide"
  MOD_RES (2)..(2): Citrulline
  MOD_RES (7)..(7): Citrulline
EXENIPXGSVQFAQEI

SEQ ID NO: 8465 - protein, 16 aa, Artificial Sequence
  source: /note="Description of Artificial Sequence: Synthetic peptide"
  MOD_RES (3)..(3): Citrulline
IPXGSVQFAQEIDQVS

SEQ ID NO: 8466 - protein, 16 aa, Artificial Sequence
  source: /note="Description of Artificial Sequence: Synthetic peptide"
  MOD_RES (11)..(11): Citrulline
  MOD_RES (15)..(15): Citrulline
KLDIKCAYATXGCGXV

SEQ ID NO: 8467 - protein, 16 aa, Artificial Sequence
  source: /note="Description of Artificial Sequence: Synthetic peptide"
  MOD_RES (9)..(9): Citrulline
AIVAPGKTXGGSPYNQ

SEQ ID NO: 8468 - protein, 16 aa, Artificial Sequence
  source: /note="Description of Artificial Sequence: Synthetic peptide"
  MOD_RES (5)..(5): Citrulline
PGKTXGGSPYNQFDII

SEQ ID NO: 8469 - protein, 16 aa, Artificial Sequence
  source: /note="Description of Artificial Sequence: Synthetic peptide"
  MOD_RES (7)..(7): Citrulline
  MOD_RES (14)..(14): Citrulline
ETVVLHXGQLLGLXAN

SEQ ID NO: 8470 - protein, 16 aa, Artificial Sequence
  source: /note="Description of Artificial Sequence: Synthetic peptide"
  MOD_RES (3)..(3): Citrulline
  MOD_RES (10)..(10): Citrulline
LHXGQLLGLXANKTSP

SEQ ID NO: 8471 - protein, 16 aa, Artificial Sequence
  source: /note="Description of Artificial Sequence: Synthetic peptide"
  MOD_RES (11)..(11): Citrulline
  MOD_RES (14)..(14): Citrulline
AWATAPADGSXGSXPL

SEQ ID NO: 8472 - protein, 16 aa, Artificial Sequence
  source: /note="Description of Artificial Sequence: Synthetic peptide"
  MOD_RES (7)..(7): Citrulline
  MOD_RES (10)..(10): Citrulline
APADGSXGSXPLAKGS

SEQ ID NO: 8473 - protein, 16 aa, Artificial Sequence
  source: /note="Description of Artificial Sequence: Synthetic peptide"
  MOD_RES (10)..(10): Citrulline
  MOD_RES (15)..(15): Citrulline
PLWSPTSIMXGVNQXL

SEQ ID NO: 8474 - protein, 16 aa, Artificial Sequence
  source: /note="Description of Artificial Sequence: Synthetic peptide"
  MOD_RES (6)..(6): Citrulline
  MOD_RES (11)..(11): Citrulline
PTSIMXGVNQXLLSQC

SEQ ID NO: 8475 - protein, 16 aa, Artificial Sequence
  source: /note="Description of Artificial Sequence: Synthetic peptide"
  MOD_RES (11)..(11): Citrulline
SLEISLDQFVXGEVLE

SEQ ID NO: 8476 - protein, 16 aa, Artificial Sequence
  source: /note="Description of Artificial Sequence: Synthetic peptide"
  MOD_RES (7)..(7): Citrulline
SLDQFVXGEVLEGSNA

SEQ ID NO: 8477 - protein, 16 aa, Artificial Sequence
  source: /note="Description of Artificial Sequence: Synthetic peptide"
  MOD_RES (3)..(3): Citrulline
FVXGEVLEGSNAYYCE

SEQ ID NO: 8478 - protein, 16 aa, Artificial Sequence
  source: /note="Description of Artificial Sequence: Synthetic peptide"
  MOD_RES (3)..(3): Citrulline
  MOD_RES (14)..(14): Citrulline
PLXGLVDTPPSALXGS

SEQ ID NO: 8479 - protein, 16 aa, Artificial Sequence
  source: /note="Description of Artificial Sequence: Synthetic peptide"
  MOD_RES (10)..(10): Citrulline
LVDTPPSALXGSQSVS

SEQ ID NO: 8480 - protein, 16 aa, Artificial Sequence
  source: /note="Description of Artificial Sequence: Synthetic peptide"
  MOD_RES (9)..(9): Citrulline
  MOD_RES (12)..(12): Citrulline
VYDPQSWDXAGXGSLL

SEQ ID NO: 8481 - protein, 16 aa, Artificial Sequence
  source: /note="Description of Artificial Sequence: Synthetic peptide"
  MOD_RES (5)..(5): Citrulline
  MOD_RES (8)..(8): Citrulline
QSWDXAGXGSLLHSYT

SEQ ID NO: 8482 - protein, 16 aa, Artificial Sequence
  source: /note="Description of Artificial Sequence: Synthetic peptide"
  MOD_RES (1)..(1): Citrulline
  MOD_RES (4)..(4): Citrulline
XAGXGSLLHSYTPKMA

SEQ ID NO: 8483 - protein, 16 aa, Artificial Sequence
  source: /note="Description of Artificial Sequence: Synthetic peptide"
  MOD_RES (7)..(7): Citrulline
  MOD_RES (11)..(11): Citrulline
PPAYSPXFQPXGLEGP

SEQ ID NO: 8484 - protein, 16 aa, Artificial Sequence
  source: /note="Description of Artificial Sequence: Synthetic peptide"
  MOD_RES (3)..(3): Citrulline
  MOD_RES (7)..(7): Citrulline
SPXFQPXGLEGPGGLE

SEQ ID NO: 8485 - protein, 16 aa, Artificial Sequence
  source: /note="Description of Artificial Sequence: Synthetic peptide"
  MOD_RES (11)..(11): Citrulline
KDNEGFGFVLXGAKAD

SEQ ID NO: 8486 - protein, 16 aa, Artificial Sequence
  source: /note="Description of Artificial Sequence: Synthetic peptide"
  MOD_RES (7)..(7): Citrulline
GFGFVLXGAKADTPIE

SEQ ID NO: 8487 - protein, 16 aa, Artificial Sequence
  source: /note="Description of Artificial Sequence: Synthetic peptide"
  MOD_RES (9)..(9): Citrulline
  MOD_RES (11)..(11): Citrulline
LLPNLSPAXPXGSLVS

SEQ ID NO: 8488 - protein, 16 aa, Artificial Sequence
  source: /note="Description of Artificial Sequence: Synthetic peptide"
  MOD_RES (5)..(5): Citrulline
  MOD_RES (7)..(7): Citrulline
LSPAXPXGSLVSLLGE

SEQ ID NO: 8489 - protein, 16 aa, Artificial Sequence
  source: /note="Description of Artificial Sequence: Synthetic peptide"
  MOD_RES (1)..(1): Citrulline
  MOD_RES (3)..(3): Citrulline
XPXGSLVSLLGEELPP

SEQ ID NO: 8490 - protein, 16 aa, Artificial Sequence
  source: /note="Description of Artificial Sequence: Synthetic peptide"
  MOD_RES (6)..(6): Citrulline
  MOD_RES (8)..(8): Citrulline
EVEIIXAXGLVVKPGS

SEQ ID NO: 8491 - protein, 16 aa, Artificial Sequence
  source: /note="Description of Artificial Sequence: Synthetic peptide"
  MOD_RES (2)..(2): Citrulline
  MOD_RES (4)..(4): Citrulline
IXAXGLVVKPGSKTLP

SEQ ID NO: 8492 - protein, 16 aa, Artificial Sequence
  source: /note="Description of Artificial Sequence: Synthetic peptide"
  MOD_RES (11)..(11): Citrulline
MYNGIGLPTPXGSGTN

SEQ ID NO: 8493 - protein, 16 aa, Artificial Sequence
  source: /note="Description of Artificial Sequence: Synthetic peptide"
  MOD_RES (7)..(7): Citrulline
IGLPTPXGSGTNGYVQ

SEQ ID NO: 8494 - protein, 16 aa, Artificial Sequence
  source: /note="Description of Artificial Sequence: Synthetic peptide"
  MOD_RES (3)..(3): Citrulline
  MOD_RES (13)..(13): Citrulline
TPXGSGTNGYVQXNLS

SEQ ID NO: 8495 - protein, 16 aa, Artificial Sequence
  source: /note="Description of Artificial Sequence: Synthetic peptide"
  MOD_RES (11)..(11): Citrulline
SGEDEPQLAPXGTSLQ

SEQ ID NO: 8496 - protein, 16 aa, Artificial Sequence
  source: /note="Description of Artificial Sequence: Synthetic peptide"
  MOD_RES (7)..(7): Citrulline
EPQLAPXGTSLQSFSA

SEQ ID NO: 8497 - protein, 16 aa, Artificial Sequence
  source: /note="Description of Artificial Sequence: Synthetic peptide"
  MOD_RES (3)..(3): Citrulline
APXGTSLQSFSASEME

SEQ ID NO: 8498 - protein, 16 aa, Artificial Sequence
  source: /note="Description of Artificial Sequence: Synthetic peptide"
  MOD_RES (7)..(7): Citrulline
  MOD_RES (12)..(12): Citrulline
PSQLPAXGTQAXATGQ

SEQ ID NO: 8499 - protein, 16 aa, Artificial Sequence
  source: /note="Description of Artificial Sequence: Synthetic peptide"
  MOD_RES (3)..(3): Citrulline
  MOD_RES (8)..(8): Citrulline
PAXGTQAXATGQSFSQ

SEQ ID NO: 8500 - protein, 16 aa, Artificial Sequence
  source: /note="Description of Artificial Sequence: Synthetic peptide"
  MOD_RES (8)..(8): Citrulline
GATYAAPXGSSPKQSP

SEQ ID NO: 8501 - protein, 16 aa, Artificial Sequence
  source: /note="Description of Artificial Sequence: Synthetic peptide"
  MOD_RES (8)..(8): Citrulline
  MOD_RES (12)..(12): Citrulline
STTLPVHXGPSXGSEI

SEQ ID NO: 8502 - protein, 16 aa, Artificial Sequence
  source: /note="Description of Artificial Sequence: Synthetic peptide"
  MOD_RES (4)..(4): Citrulline
  MOD_RES (8)..(8): Citrulline
PVHXGPSXGSEIQPPP

SEQ ID NO: 8503 - protein, 16 aa, Artificial Sequence
  source: /note="Description of Artificial Sequence: Synthetic peptide"
  MOD_RES (9)..(9): Citrulline
TDLYAKQGXGSQFTSK

SEQ ID NO: 8504 - protein, 16 aa, Artificial Sequence
  source: /note="Description of Artificial Sequence: Synthetic peptide"
  MOD_RES (5)..(5): Citrulline
  MOD_RES (15)..(15): Citrulline
AKQGXGSQFTSKEEXD

SEQ ID NO: 8505 - protein, 16 aa, Artificial Sequence
  source: /note="Description of Artificial Sequence: Synthetic peptide"
  MOD_RES (9)..(9): Citrulline
AEPPGGGWXGSLGEPP

SEQ ID NO: 8506 - protein, 16 aa, Artificial Sequence
  source: /note="Description of Artificial Sequence: Synthetic peptide"
  MOD_RES (5)..(5): Citrulline
  MOD_RES (16)..(16): Citrulline
GGGWXGSLGEPPPPPX

SEQ ID NO: 8507 - protein, 16 aa, Artificial Sequence
  source: /note="Description of Artificial Sequence: Synthetic peptide"
  MOD_RES (4)..(4): Citrulline
  MOD_RES (10)..(10): Citrulline
ALTXYGGVGXGAKAVN

SEQ ID NO: 8508 - protein, 16 aa, Artificial Sequence
  source: /note="Description of Artificial Sequence: Synthetic peptide"
  MOD_RES (6)..(6): Citrulline
YGGVGXGAKAVNAAKH

SEQ ID NO: 8509 - protein, 16 aa, Artificial Sequence
  source: /note="Description of Artificial Sequence: Synthetic peptide"
  MOD_RES (8)..(8): Citrulline
  MOD_RES (10)..(10): Citrulline
ASLKSLTXDXGMLYKD

SEQ ID NO: 8510 - protein, 16 aa, Artificial Sequence
  source: /note="Description of Artificial Sequence: Synthetic peptide"
  MOD_RES (4)..(4): Citrulline
  MOD_RES (6)..(6): Citrulline
SLTXDXGMLYKDVASG

SEQ ID NO: 8511 - protein, 16 aa, Artificial Sequence
  source: /note="Description of Artificial Sequence: Synthetic peptide"
  MOD_RES (10)..(10): Citrulline
  MOD_RES (16)..(16): Citrulline
MGSKGYPGSXGEKGSX

SEQ ID NO: 8512 - protein, 16 aa, Artificial Sequence
  source: /note="Description of Artificial Sequence: Synthetic peptide"
  MOD_RES (6)..(6): Citrulline
  MOD_RES (12)..(12): Citrulline
GYPGSXGEKGSXGEKG

SEQ ID NO: 8513 - protein, 16 aa, Artificial Sequence
  source: /note="Description of Artificial Sequence: Synthetic peptide"
  MOD_RES (2)..(2): Citrulline
  MOD_RES (7)..(7): Citrulline
GXSCWSXGTPFPHGSS

SEQ ID NO: 8514 - protein, 16 aa, Artificial Sequence
  source: /note="Description of Artificial Sequence: Synthetic peptide"
  MOD_RES (3)..(3): Citrulline
WSXGTPFPHGSSWVED

SEQ ID NO: 8515 - protein, 16 aa, Artificial Sequence
  source: /note="Description of Artificial Sequence: Synthetic peptide"
  MOD_RES (1)..(1): Citrulline
  MOD_RES (11)..(11): Citrulline
XNILCMPIVSXGSVIG

SEQ ID NO: 8516 - protein, 16 aa, Artificial Sequence
  source: /note="Description of Artificial Sequence: Synthetic peptide"
  MOD_RES (7)..(7): Citrulline
CMPIVSXGSVIGVVQM

SEQ ID NO: 8517 - protein, 16 aa, Artificial Sequence
  source: /note="Description of Artificial Sequence: Synthetic peptide"
  MOD_RES (3)..(3): Citrulline
VSXGSVIGVVQMVNKI

SEQ ID NO: 8518 - protein, 16 aa, Artificial Sequence
  source: /note="Description of Artificial Sequence: Synthetic peptide"
  MOD_RES (1)..(1): Citrulline
  MOD_RES (11)..(11): Citrulline
XQGGDLGWMTXGSMVG

SEQ ID NO: 8519 - protein, 16 aa, Artificial Sequence
  source: /note="Description of Artificial Sequence: Synthetic peptide"
  MOD_RES (7)..(7): Citrulline
DLGWMTXGSMVGPFQE

SEQ ID NO: 8520 - protein, 16 aa, Artificial Sequence
  source: /note="Description of Artificial Sequence: Synthetic peptide"
  MOD_RES (3)..(3): Citrulline
MTXGSMVGPFQEAAFA

SEQ ID NO: 8521 - protein, 16 aa, Artificial Sequence
  source: /note="Description of Artificial Sequence: Synthetic peptide"
  MOD_RES (7)..(7): Citrulline
  MOD_RES (11)..(11): Citrulline
QAAAQAXCTAXGGSLA

SEQ ID NO: 8522 - protein, 16 aa, Artificial Sequence
  source: /note="Description of Artificial Sequence: Synthetic peptide"
  MOD_RES (3)..(3): Citrulline
  MOD_RES (7)..(7): Citrulline
QAXCTAXGGSLAQPAD

SEQ ID NO: 8523 - protein, 16 aa, Artificial Sequence
  source: /note="Description of Artificial Sequence: Synthetic peptide"
  MOD_RES (11)..(11): Citrulline
TIVKEGWVQKXGEYIK

SEQ ID NO: 8524 - protein, 16 aa, Artificial Sequence
  source: /note="Description of Artificial Sequence: Synthetic peptide"
  MOD_RES (7)..(7): Citrulline
  MOD_RES (15)..(15): Citrulline
EGWVQKXGEYIKNWXP

SEQ ID NO: 8525 - protein, 16 aa, Artificial Sequence
  source: /note="Description of Artificial Sequence: Synthetic peptide"
  MOD_RES (9)..(9): Citrulline
SLHLGTATXGSDISKT

SEQ ID NO: 8526 - protein, 16 aa, Artificial Sequence
  source: /note="Description of Artificial Sequence: Synthetic peptide"
  MOD_RES (5)..(5): Citrulline
GTATXGSDISKTCCFQ

SEQ ID NO: 8527 - protein, 16 aa, Artificial Sequence
  source: /note="Description of Artificial Sequence: Synthetic peptide"
  MOD_RES (8)..(8): Citrulline
SPCQEHKXGGLGELKG

SEQ ID NO: 8528 - protein, 16 aa, Artificial Sequence
  source: /note="Description of Artificial Sequence: Synthetic peptide"
  MOD_RES (4)..(4): Citrulline
EHKXGGLGELKGTPAA

SEQ ID NO: 8529 - protein, 16 aa, Artificial Sequence
  source: /note="Description of Artificial Sequence: Synthetic peptide"
  MOD_RES (10)..(10): Citrulline
FVPWLLSFKXGSALEE

SEQ ID NO: 8530 - protein, 16 aa, Artificial Sequence
  source: /note="Description of Artificial Sequence: Synthetic peptide"
  MOD_RES (6)..(6): Citrulline
LLSFKXGSALEEKENK

SEQ ID NO: 8531 - protein, 16 aa, Artificial Sequence
  source: /note="Description of Artificial Sequence: Synthetic peptide"
  MOD_RES (8)..(8): Citrulline
ELYVDKSXGDKLKINI

SEQ ID NO: 8532 - protein, 16 aa, Artificial Sequence
  source: /note="Description of Artificial Sequence: Synthetic peptide"
  MOD_RES (4)..(4): Citrulline
DKSXGDKLKINIDVLF

SEQ ID NO: 8533 - protein, 16 aa, Artificial Sequence
  source: /note="Description of Artificial Sequence: Synthetic peptide"
  MOD_RES (10)..(10): Citrulline
IGMKDANTIXGSASQG

SEQ ID NO: 8534 - protein, 16 aa, Artificial Sequence
  source: /note="Description of Artificial Sequence: Synthetic peptide"
  MOD_RES (6)..(6): Citrulline
DANTIXGSASQGNLTE

SEQ ID NO: 8535 - protein, 16 aa, Artificial Sequence
  source: /note="Description of Artificial Sequence: Synthetic peptide"
  MOD_RES (12)..(12): Citrulline
DSYKCDYPESYXGSPL

SEQ ID NO: 8536 - protein, 16 aa, Artificial Sequence
  source: /note="Description of Artificial Sequence: Synthetic peptide"
  MOD_RES (8)..(8): Citrulline
CDYPESYXGSPLKDFH

SEQ ID NO: 8537 - protein, 16 aa, Artificial Sequence
  source: /note="Description of Artificial Sequence: Synthetic peptide"
  MOD_RES (4)..(4): Citrulline
ESYXGSPLKDFHMSEL

SEQ ID NO: 8538 - protein, 16 aa, Artificial Sequence
  source: /note="Description of Artificial Sequence: Synthetic peptide"
  MOD_RES (4)..(4): Citrulline
  MOD_RES (11)..(11): Citrulline
QEAXGLQFVWXGSPSL

SEQ ID NO: 8539 - protein, 16 aa, Artificial Sequence
  source: /note="Description of Artificial Sequence: Synthetic peptide"
  MOD_RES (7)..(7): Citrulline
  MOD_RES (15)..(15): Citrulline
GLQFVWXGSPSLSEXQ

SEQ ID NO: 8540 - protein, 16 aa, Artificial Sequence
  source: /note="Description of Artificial Sequence: Synthetic peptide"
  MOD_RES (14)..(14): Citrulline
GPEHPNPGKSFSAXGF

SEQ ID NO: 8541 - protein, 16 aa, Artificial Sequence
  source: /note="Description of Artificial Sequence: Synthetic peptide"
  MOD_RES (10)..(10): Citrulline
  MOD_RES (14)..(14): Citrulline
PNPGKSFSAXGFPXHC

SEQ ID NO: 8542 - protein, 16 aa, Artificial Sequence
  source: /note="Description of Artificial Sequence: Synthetic peptide"
  MOD_RES (9)..(9): Citrulline
  MOD_RES (12)..(12): Citrulline
LGPESLLLXGAXLKNT

SEQ ID NO: 8543 - protein, 16 aa, Artificial Sequence
  source: /note="Description of Artificial Sequence: Synthetic peptide"
  MOD_RES (5)..(5): Citrulline
  MOD_RES (8)..(8): Citrulline
SLLLXGAXLKNTKEIF

SEQ ID NO: 8544 - protein, 16 aa, Artificial Sequence
  source: /note="Description of Artificial Sequence: Synthetic peptide"
  MOD_RES (1)..(1): Citrulline
  MOD_RES (4)..(4): Citrulline
XGAXLKNTKEIFGVAV

SEQ ID NO: 8545 - protein, 16 aa, Artificial Sequence
  source: /note="Description of Artificial Sequence: Synthetic peptide"
  MOD_RES (7)..(7): Citrulline
ADVIQAXGMKKQIIDD

SEQ ID NO: 8546 - protein, 16 aa, Artificial Sequence
  source: /note="Description of Artificial Sequence: Synthetic peptide"
  MOD_RES (6)..(6): Citrulline
LSYKVXGNKPSCLLAE

SEQ ID NO: 8547 - protein, 16 aa, Artificial Sequence
  source: /note="Description of Artificial Sequence: Synthetic peptide"
  MOD_RES (2)..(2): Citrulline
  MOD_RES (15)..(15): Citrulline
VXGNKPSCLLAEQNXG

SEQ ID NO: 8548 - protein, 16 aa, Artificial Sequence
  source: /note="Description of Artificial Sequence: Synthetic peptide"
  MOD_RES (10)..(10): Citrulline
  MOD_RES (16)..(16): Citrulline
DGFSTLQFPXGEAKAX

SEQ ID NO: 8549 - protein, 16 aa, Artificial Sequence
  source: /note="Description of Artificial Sequence: Synthetic peptide"
  MOD_RES (6)..(6): Citrulline
  MOD_RES (12)..(12): Citrulline
TLQFPXGEAKAXGESP

SEQ ID NO: 8550 - protein, 16 aa, Artificial Sequence
  source: /note="Description of Artificial Sequence: Synthetic peptide"
  MOD_RES (15)..(15): Citrulline
CPSLGVGTDTNYVKXG

SEQ ID NO: 8551 - protein, 16 aa, Artificial Sequence
  source: /note="Description of Artificial Sequence: Synthetic peptide"
  MOD_RES (11)..(11): Citrulline
GVGTDTNYVKXGSWST

SEQ ID NO: 8552 - protein, 16 aa, Artificial Sequence
  source: /note="Description of Artificial Sequence: Synthetic peptide"
  MOD_RES (5)..(5): Citrulline
  MOD_RES (11)..(11): Citrulline
DSSTXPPSVTXGGVAP

SEQ ID NO: 8553 - protein, 16 aa, Artificial Sequence
  source: /note="Description of Artificial Sequence: Synthetic peptide"
  MOD_RES (1)..(1): Citrulline
  MOD_RES (7)..(7): Citrulline
XPPSVTXGGVAPAPEA

SEQ ID NO: 8554 - protein, 16 aa, Artificial Sequence
  source: /note="Description of Artificial Sequence: Synthetic peptide"
  MOD_RES (3)..(3): Citrulline
VTXGGVAPAPEAPEPP

SEQ ID NO: 8555 - protein, 16 aa, Artificial Sequence
  source: /note="Description of Artificial Sequence: Synthetic peptide"
  MOD_RES (5)..(5): Citrulline
  MOD_RES (12)..(12): Citrulline
YTYKXFEGLTQXGSIP

SEQ ID NO: 8556 - protein, 16 aa, Artificial Sequence
  source: /note="Description of Artificial Sequence: Synthetic peptide"
  MOD_RES (1)..(1): Citrulline
  MOD_RES (8)..(8): Citrulline
XFEGLTQXGSIPTYMK

SEQ ID NO: 8557 - protein, 16 aa, Artificial Sequence
  source: /note="Description of Artificial Sequence: Synthetic peptide"
  MOD_RES (4)..(4): Citrulline
LTQXGSIPTYMKAGKL

SEQ ID NO: 8558 - protein, 16 aa, Artificial Sequence
  source: /note="Description of Artificial Sequence: Synthetic peptide"
  MOD_RES (5)..(5): Citrulline
  MOD_RES (13)..(13): Citrulline
NNPSXGTDTAKHXGGL

SEQ ID NO: 8559 - protein, 16 aa, Artificial Sequence
  source: /note="Description of Artificial Sequence: Synthetic peptide"
  MOD_RES (5)..(5): Citrulline
  MOD_RES (11)..(11): Citrulline
LDPTXSCTQPXGAFAD

SEQ ID NO: 8560 - protein, 16 aa, Artificial Sequence
  source: /note="Description of Artificial Sequence: Synthetic peptide"
  MOD_RES (11)..(11): Citrulline
  MOD_RES (15)..(15): Citrulline
LEEPPQGPLPXGSQXS

SEQ ID NO: 8561 - protein, 16 aa, Artificial Sequence
  source: /note="Description of Artificial Sequence: Synthetic peptide"
  MOD_RES (7)..(7): Citrulline
  MOD_RES (11)..(11): Citrulline
PQGPLPXGSQXSEQLE

SEQ ID NO: 8562 - protein, 16 aa, Artificial Sequence
  source: /note="Description of Artificial Sequence: Synthetic peptide"
  MOD_RES (10)..(11): Citrulline
CHKHSVEVAXXGSLPS

SEQ ID NO: 8563 - protein, 16 aa, Artificial Sequence
  source: /note="Description of Artificial Sequence: Synthetic peptide"
  MOD_RES (6)..(7): Citrulline
SVEVAXXGSLPSHLQL

SEQ ID NO: 8564 - protein, 16 aa, Artificial Sequence
  source: /note="Description of Artificial Sequence: Synthetic peptide"
  MOD_RES (2)..(3): Citrulline
AXXGSLPSHLQLADPQ

SEQ ID NO: 8565 - protein, 16 aa, Artificial Sequence
  source: /note="Description of Artificial Sequence: Synthetic peptide"
  MOD_RES (10)..(10): Citrulline
LSHSSPWQAXGGKSGA

SEQ ID NO: 8566 - protein, 16 aa, Artificial Sequence
  source: /note="Description of Artificial Sequence: Synthetic peptide"
  MOD_RES (6)..(6): Citrulline
SPWQAXGGKSGAAFYA

SEQ ID NO: 8567 - protein, 16 aa, Artificial Sequence
  source: /note="Description of Artificial Sequence: Synthetic peptide"
  MOD_RES (4)..(4): Citrulline
  MOD_RES (12)..(12): Citrulline
PMKXAGTTGSAXGMAL

SEQ ID NO: 8568 - protein, 16 aa, Artificial Sequence
  source: /note="Description of Artificial Sequence: Synthetic peptide"
  MOD_RES (8)..(8): Citrulline
AGTTGSAXGMALYEEE

SEQ ID NO: 8569 - protein, 16 aa, Artificial Sequence
  source: /note="Description of Artificial Sequence: Synthetic peptide"
  MOD_RES (9)..(9): Citrulline
  MOD_RES (11)..(11): Citrulline
EYTCDVEKXSXGQVLF

SEQ ID NO: 8570 - protein, 16 aa, Artificial Sequence
  source: /note="Description of Artificial Sequence: Synthetic peptide"
  MOD_RES (5)..(5): Citrulline
  MOD_RES (7)..(7): Citrulline
DVEKXSXGQVLFDKVC

SEQ ID NO: 8571 - protein, 16 aa, Artificial Sequence
  source: /note="Description of Artificial Sequence: Synthetic peptide"
  MOD_RES (1)..(1): Citrulline
  MOD_RES (3)..(3): Citrulline
XSXGQVLFDKVCEHLN

SEQ ID NO: 8572 - protein, 16 aa, Artificial Sequence
  source: /note="Description of Artificial Sequence: Synthetic peptide"
  MOD_RES (12)..(12): Citrulline
  MOD_RES (15)..(15): Citrulline
CELKVCFQYLNXGDXW

SEQ ID NO: 8573 - protein, 16 aa, Artificial Sequence
  source: /note="Description of Artificial Sequence: Synthetic peptide"
  MOD_RES (8)..(8): Citrulline
  MOD_RES (11)..(11): Citrulline
VCFQYLNXGDXWIQDE

SEQ ID NO: 8574 - protein, 16 aa, Artificial Sequence
  source: /note="Description of Artificial Sequence: Synthetic peptide"
  MOD_RES (9)..(9): Citrulline
GTAAGSSGXGISISPS

SEQ ID NO: 8575 - protein, 16 aa, Artificial Sequence
  source: /note="Description of Artificial Sequence: Synthetic peptide"
  MOD_RES (5)..(5): Citrulline
GSSGXGISISPSAGQM

SEQ ID NO: 8576 - protein, 16 aa, Artificial Sequence
  source: /note="Description of Artificial Sequence: Synthetic peptide"
  MOD_RES (10)..(10): Citrulline
HPHLFSDQSXGSPSSY

SEQ ID NO: 8577 - protein, 16 aa, Artificial Sequence
  source: /note="Description of Artificial Sequence: Synthetic peptide"
  MOD_RES (6)..(6): Citrulline
FSDQSXGSPSSYSPST

SEQ ID NO: 8578 - protein, 16 aa, Artificial Sequence
  source: /note="Description of Artificial Sequence: Synthetic peptide"
  MOD_RES (2)..(2): Citrulline
SXGSPSSYSPSTGVGF

SEQ ID NO: 8579 - protein, 16 aa, Artificial Sequence
  source: /note="Description of Artificial Sequence: Synthetic peptide"
  MOD_RES (9)..(9): Citrulline
KVGNEYVTXGQTIEQV

SEQ ID NO: 8580 - protein, 16 aa, Artificial Sequence
  source: /note="Description of Artificial Sequence: Synthetic peptide"
  MOD_RES (5)..(5): Citrulline
EYVTXGQTIEQVTCAV

SEQ ID NO: 8581 - protein, 16 aa, Artificial Sequence
  source: /note="Description of Artificial Sequence: Synthetic peptide"
  MOD_RES (10)..(10): Citrulline
SFSGISILTXGDSIGS

SEQ ID NO: 8582 - protein, 16 aa, Artificial Sequence
  source: /note="Description of Artificial Sequence: Synthetic peptide"
  MOD_RES (6)..(6): Citrulline
ISILTXGDSIGSSKGG

SEQ ID NO: 8583 - protein, 16 aa, Artificial Sequence
  source: /note="Description of Artificial Sequence: Synthetic peptide"
  MOD_RES (2)..(2): Citrulline
  MOD_RES (16)..(16): Citrulline
TXGDSIGSSKGGSAGX

SEQ ID NO: 8584 - protein, 16 aa, Artificial Sequence
  source: /note="Description of Artificial Sequence: Synthetic peptide"
  MOD_RES (8)..(8): Citrulline
VTSSQSVXGLLPCTAQ

SEQ ID NO: 8585 - protein, 15 aa, Artificial Sequence
  source: /note="Description of Artificial Sequence: Synthetic peptide"
  MOD_RES (4)..(4): Citrulline
QSVXGLLPCTAQQQQ

SEQ ID NO: 8586 - protein, 16 aa, Artificial Sequence
  source: /note="Description of Artificial Sequence: Synthetic peptide"
  MOD_RES (10)..(10): Citrulline
SHPVAYSPQXGQQLPQ

SEQ ID NO: 8587 - protein, 16 aa, Artificial Sequence
  source: /note="Description of Artificial Sequence: Synthetic peptide"
  MOD_RES (6)..(6): Citrulline
AYSPQXGQQLPQPSQQ

SEQ ID NO: 8588 - protein, 16 aa, Artificial Sequence
  source: /note="Description of Artificial Sequence: Synthetic peptide"
  MOD_RES (2)..(2): Citrulline
QXGQQLPQPSQQPGLQ

SEQ ID NO: 8589 - protein, 16 aa, Artificial Sequence
  source: /note="Description of Artificial Sequence: Synthetic peptide"
  MOD_RES (13)..(13): Citrulline
MEGKDFNVEYIQXGGL

SEQ ID NO: 8590 - protein, 16 aa, Artificial Sequence
  source: /note="Description of Artificial Sequence: Synthetic peptide"
  MOD_RES (9)..(9): Citrulline
  MOD_RES (13)..(13): Citrulline
DFNVEYIQXGGLXDPL

SEQ ID NO: 8591 - protein, 16 aa, Artificial Sequence
  source: /note="Description of Artificial Sequence: Synthetic peptide"
  MOD_RES (5)..(5): Citrulline
  MOD_RES (9)..(9): Citrulline
EYIQXGGLXDPLIFKN

SEQ ID NO: 8592 - protein, 16 aa, Artificial Sequence
  source: /note="Description of Artificial Sequence: Synthetic peptide"
  MOD_RES (5)..(5): Citrulline
  MOD_RES (9)..(9): Citrulline
GGAAXLNGXGSWAQDG

SEQ ID NO: 8593 - protein, 16 aa, Artificial Sequence
  source: /note="Description of Artificial Sequence: Synthetic peptide"
  MOD_RES (1)..(1): Citrulline
  MOD_RES (5)..(5): Citrulline
XLNGXGSWAQDGDESW

SEQ ID NO: 8594 - protein, 16 aa, Artificial Sequence
  source: /note="Description of Artificial Sequence: Synthetic peptide"
  MOD_RES (13)..(13): Citrulline
CHTGKYSLSMSVXGKQ

SEQ ID NO: 8595 - protein, 16 aa, Artificial Sequence
  source: /note="Description of Artificial Sequence: Synthetic peptide"
  MOD_RES (9)..(9): Citrulline
KYSLSMSVXGKQDLEI

SEQ ID NO: 8596 - protein, 16 aa, Artificial Sequence
  source: /note="Description of Artificial Sequence: Synthetic peptide"
  MOD_RES (5)..(5): Citrulline
  MOD_RES (16)..(16): Citrulline
SMSVXGKQDLEIQGPX

SEQ ID NO: 8597 - protein, 16 aa, Artificial Sequence
  source: /note="Description of Artificial Sequence: Synthetic peptide"
  MOD_RES (10)..(10): Citrulline
HYLKIKGLTXGQAVVQ

SEQ ID NO: 8598 - protein, 16 aa, Artificial Sequence
  source: /note="Description of Artificial Sequence: Synthetic peptide"
  MOD_RES (6)..(6): Citrulline
IKGLTXGQAVVQYMKI

SEQ ID NO: 8599 - protein, 16 aa, Artificial Sequence
  source: /note="Description of Artificial Sequence: Synthetic peptide"
  MOD_RES (2)..(2): Citrulline
TXGQAVVQYMKIVEAL

SEQ ID NO: 8600 - protein, 16 aa, Artificial Sequence
  source: /note="Description of Artificial Sequence: Synthetic peptide"
  MOD_RES (9)..(9): Citrulline
  MOD_RES (11)..(11): Citrulline
KECHKCHGXGXYKCSG

SEQ ID NO: 8601 - protein, 16 aa, Artificial Sequence
  source: /note="Description of Artificial Sequence: Synthetic peptide"
  MOD_RES (9)..(9): Citrulline
LAHTLPFAXGVSAHLD

SEQ ID NO: 8602 - protein, 16 aa, Artificial Sequence
  source: /note="Description of Artificial Sequence: Synthetic peptide"
  MOD_RES (5)..(5): Citrulline
LPFAXGVSAHLDKASI

SEQ ID NO: 8603 - protein, 16 aa, Artificial Sequence
  source: /note="Description of Artificial Sequence: Synthetic peptide"
  MOD_RES (10)..(10): Citrulline
  MOD_RES (16)..(16): Citrulline
PGSLEPPLGXGAFLSX

SEQ ID NO: 8604 - protein, 16 aa, Artificial Sequence
  source: /note="Description of Artificial Sequence: Synthetic peptide"
  MOD_RES (6)..(6): Citrulline
  MOD_RES (12)..(12): Citrulline
EPPLGXGAFLSXHSLD

SEQ ID NO: 8605 - protein, 16 aa, Artificial Sequence
  source: /note="Description of Artificial Sequence: Synthetic peptide"
  MOD_RES (2)..(2): Citrulline
  MOD_RES (8)..(8): Citrulline
GXGAFLSXHSLDMKFT

SEQ ID NO: 8606 - protein, 16 aa, Artificial Sequence
  source: /note="Description of Artificial Sequence: Synthetic peptide"
  MOD_RES (3)..(3): Citrulline
  MOD_RES (10)..(10): Citrulline
IIXLKKYEKXGELVTV

SEQ ID NO: 8607 - protein, 16 aa, Artificial Sequence
  source: /note="Description of Artificial Sequence: Synthetic peptide"
  MOD_RES (6)..(6): Citrulline
KKYEKXGELVTVLDKF

SEQ ID NO: 8608 - protein, 16 aa, Artificial Sequence
  source: /note="Description of Artificial Sequence: Synthetic peptide"
  MOD_RES (9)..(9): Citrulline
  MOD_RES (14)..(14): Citrulline
LGADQILLXGAQLXNT

SEQ ID NO: 8609 - protein, 16 aa, Artificial Sequence
  source: /note="Description of Artificial Sequence: Synthetic peptide"
  MOD_RES (5)..(5): Citrulline
  MOD_RES (10)..(10): Citrulline
QILLXGAQLXNTQWVH

SEQ ID NO: 8610 - protein, 16 aa, Artificial Sequence
  source: /note="Description of Artificial Sequence: Synthetic peptide"
  MOD_RES (6)..(6): Citrulline
TALLAXGIDFKGVNLV

SEQ ID NO: 8611 - protein, 16 aa, Artificial Sequence
  source: /note="Description of Artificial Sequence: Synthetic peptide"
  MOD_RES (7)..(7): Citrulline
  MOD_RES (11)..(11): Citrulline
ESKINLXIQTXGTLPA

SEQ ID NO: 8612 - protein, 16 aa, Artificial Sequence
  source: /note="Description of Artificial Sequence: Synthetic peptide"
  MOD_RES (3)..(3): Citrulline
  MOD_RES (7)..(7): Citrulline
NLXIQTXGTLPAVEPF

SEQ ID NO: 8613 - protein, 16 aa, Artificial Sequence
  source: /note="Description of Artificial Sequence: Synthetic peptide"
  MOD_RES (3)..(3): Citrulline
  MOD_RES (14)..(14): Citrulline
QTXGTLPAVEPFQXGL

SEQ ID NO: 8614 - protein, 16 aa, Artificial Sequence
  source: /note="Description of Artificial Sequence: Synthetic peptide"
  MOD_RES (10)..(10): Citrulline
MPSEQFGGSXGSTLPK

SEQ ID NO: 8615 - protein, 16 aa, Artificial Sequence
  source: /note="Description of Artificial Sequence: Synthetic peptide"
  MOD_RES (6)..(6): Citrulline
NVFHEXGASIAHCPNS

SEQ ID NO: 8616 - protein, 16 aa, Artificial Sequence
  source: /note="Description of Artificial Sequence: Synthetic peptide"
  MOD_RES (2)..(2): Citrulline
  MOD_RES (8)..(8): Citrulline
DXASLQYXGLKAPPAP

SEQ ID NO: 8617 - protein, 16 aa, Artificial Sequence
  source: /note="Description of Artificial Sequence: Synthetic peptide"
  MOD_RES (4)..(4): Citrulline
LQYXGLKAPPAPLAAS

SEQ ID NO: 8618 - protein, 16 aa, Artificial Sequence
  source: /note="Description of Artificial Sequence: Synthetic peptide"
  MOD_RES (5)..(5): Citrulline
  MOD_RES (12)..(12): Citrulline
TLHEXFTKYLKXGTEQ

SEQ ID NO: 8619 - protein, 16 aa, Artificial Sequence
  source: /note="Description of Artificial Sequence: Synthetic peptide"
  MOD_RES (1)..(1): Citrulline
  MOD_RES (8)..(8): Citrulline
XFTKYLKXGTEQEAAK

SEQ ID NO: 8620 - protein, 16 aa, Artificial Sequence
  source: /note="Description of Artificial Sequence: Synthetic peptide"
  MOD_RES (6)..(6): Citrulline
MITCIXGLEKAKVIQP

SEQ ID NO: 8621 - protein, 16 aa, Artificial Sequence
  source: /note="Description of Artificial Sequence: Synthetic peptide"
  MOD_RES (2)..(2): Citrulline
IXGLEKAKVIQPDGVL

SEQ ID NO: 8622 - protein, 16 aa, Artificial Sequence
  source: /note="Description of Artificial Sequence: Synthetic peptide"
  MOD_RES (6)..(6): Citrulline
  MOD_RES (9)..(9): Citrulline
EDLWVXGGXILDPEKL

SEQ ID NO: 8623 - protein, 16 aa, Artificial Sequence
  source: /note="Description of Artificial Sequence: Synthetic peptide"
  MOD_RES (2)..(2): Citrulline
  MOD_RES (5)..(5): Citrulline
VXGGXILDPEKLFFEE

SEQ ID NO: 8624 - protein, 16 aa, Artificial Sequence
  source: /note="Description of Artificial Sequence: Synthetic peptide"
  MOD_RES (5)..(5): Citrulline
AMAAXGAGGSLGAGGS

SEQ ID NO: 8625 - protein, 16 aa, Artificial Sequence
  source: /note="Description of Artificial Sequence: Synthetic peptide"
  MOD_RES (1)..(1): Citrulline
  MOD_RES (13)..(13): Citrulline
XGAGGSLGAGGSXGPL

SEQ ID NO: 8626 - protein, 16 aa, Artificial Sequence
  source: /note="Description of Artificial Sequence: Synthetic peptide"
  MOD_RES (9)..(9): Citrulline
GSLGAGGSXGPLPGGF

SEQ ID NO: 8627 - protein, 16 aa, Artificial Sequence
  source: /note="Description of Artificial Sequence: Synthetic peptide"
  MOD_RES (5)..(5): Citrulline
AGGSXGPLPGGFSGGN

SEQ ID NO: 8628 - protein, 16 aa, Artificial Sequence
  source: /note="Description of Artificial Sequence: Synthetic peptide"
  MOD_RES (3)..(3): Citrulline
  MOD_RES (10)..(10): Citrulline
FDXSSSQPPXGGINKD

SEQ ID NO: 8629 - protein, 16 aa, Artificial Sequence
  source: /note="Description of Artificial Sequence: Synthetic peptide"
  MOD_RES (6)..(6): Citrulline
SSQPPXGGINKDSTSP

SEQ ID NO: 8630 - protein, 16 aa, Artificial Sequence
  source: /note="Description of Artificial Sequence: Synthetic peptide"
  MOD_RES (2)..(2): Citrulline
PXGGINKDSTSPGFSP

SEQ ID NO: 8631 - protein, 16 aa, Artificial Sequence
  source: /note="Description of Artificial Sequence: Synthetic peptide"
  MOD_RES (10)..(10): Citrulline
  MOD_RES (13)..(13): Citrulline
DWGPFLAQHXGEXYKN

SEQ ID NO: 8632 - protein, 16 aa, Artificial Sequence
  source: /note="Description of Artificial Sequence: Synthetic peptide"
  MOD_RES (6)..(6): Citrulline
  MOD_RES (9)..(9): Citrulline
FLAQHXGEXYKNMIDP

SEQ ID NO: 8633 - protein, 16 aa, Artificial Sequence
  source: /note="Description of Artificial Sequence: Synthetic peptide"
  MOD_RES (8)..(8): Citrulline
AKVVWQFXGKEDLDKW

SEQ ID NO: 8634 - protein, 16 aa, Artificial Sequence
  source: /note="Description of Artificial Sequence: Synthetic peptide"
  MOD_RES (4)..(4): Citrulline
WQFXGKEDLDKWTVTS

SEQ ID NO: 8635 - protein, 16 aa, Artificial Sequence
  source: /note="Description of Artificial Sequence: Synthetic peptide"
  MOD_RES (10)..(10): Citrulline
PPLGPVLGQXGVSINQ

SEQ ID NO: 8636 - protein, 16 aa, Artificial Sequence
  source: /note="Description of Artificial Sequence: Synthetic peptide"
  MOD_RES (6)..(6): Citrulline
PVLGQXGVSINQFCKE

SEQ ID NO: 8637 - protein, 16 aa, Artificial Sequence
  source: /note="Description of Artificial Sequence: Synthetic peptide"
  MOD_RES (11)..(11): Citrulline
KEYEKALKYVXGLLQT

SEQ ID NO: 8638 - protein, 16 aa, Artificial Sequence
  source: /note="Description of Artificial Sequence: Synthetic peptide"
  MOD_RES (7)..(7): Citrulline
KALKYVXGLLQTEPQN

SEQ ID NO: 8639 - protein, 16 aa, Artificial Sequence
  source: /note="Description of Artificial Sequence: Synthetic peptide"
  MOD_RES (5)..(5): Citrulline
  MOD_RES (9)..(9): Citrulline
VLYEXLETXGYNEKKL

SEQ ID NO: 8640 - protein, 16 aa, Artificial Sequence
  source: /note="Description of Artificial Sequence: Synthetic peptide"
  MOD_RES (1)..(1): Citrulline
  MOD_RES (5)..(5): Citrulline
XLETXGYNEKKLTDNI

SEQ ID NO: 8641 - protein, 16 aa, Artificial Sequence
  source: /note="Description of Artificial Sequence: Synthetic peptide"
  MOD_RES (6)..(6): Citrulline
SEGPAXGAGKSSTNGD

SEQ ID NO: 8642 - protein, 16 aa, Artificial Sequence
  source: /note="Description of Artificial Sequence: Synthetic peptide"
  MOD_RES (1)..(1): Citrulline
  MOD_RES (10)..(10): Citrulline
XGSLASLGSXGGGSGG

SEQ ID NO: 8643 - protein, 16 aa, Artificial Sequence
  source: /note="Description of Artificial Sequence: Synthetic peptide"
  MOD_RES (6)..(6): Citrulline
ASLGSXGGGSGGTGSG

SEQ ID NO: 8644 - protein, 16 aa, Artificial Sequence
  source: /note="Description of Artificial Sequence: Synthetic peptide"
  MOD_RES (14)..(14): Citrulline
GASGGASPVGFTPXGG

SEQ ID NO: 8645 - protein, 16 aa, Artificial Sequence
  source: /note="Description of Artificial Sequence: Synthetic peptide"
  MOD_RES (10)..(10): Citrulline
GASPVGFTPXGGLSPP

SEQ ID NO: 8646 - protein, 16 aa, Artificial Sequence
  source: /note="Description of Artificial Sequence: Synthetic peptide"
  MOD_RES (6)..(6): Citrulline
VGFTPXGGLSPPGHSP

SEQ ID NO: 8647 - protein, 16 aa, Artificial Sequence
  source: /note="Description of Artificial Sequence: Synthetic peptide"
  MOD_RES (6)..(6): Citrulline
  MOD_RES (11)..(11): Citrulline
NTYDWXSPKQXGSLSP

SEQ ID NO: 8648 - protein, 16 aa, Artificial Sequence
  source: /note="Description of Artificial Sequence: Synthetic peptide"
  MOD_RES (2)..(2): Citrulline
  MOD_RES (7)..(7): Citrulline
WXSPKQXGSLSPVTKP

SEQ ID NO: 8649 - protein, 16 aa, Artificial Sequence
  source: /note="Description of Artificial Sequence: Synthetic peptide"
  MOD_RES (11)..(11): Citrulline
KQMLSDLFTAXGSPFK

SEQ ID NO: 8650 - protein, 16 aa, Artificial Sequence
  source: /note="Description of Artificial Sequence: Synthetic peptide"
  MOD_RES (7)..(7): Citrulline
SDLFTAXGSPFKTKSS

SEQ ID NO: 8651 - protein, 16 aa, Artificial Sequence
  source: /note="Description of Artificial Sequence: Synthetic peptide"
  MOD_RES (3)..(3): Citrulline
TAXGSPFKTKSSESPS

SEQ ID NO: 8652 - protein, 16 aa, Artificial Sequence
  source: /note="Description of Artificial Sequence: Synthetic peptide"
  MOD_RES (9)..(9): Citrulline
EKSELAPTXGAVMEQG

SEQ ID NO: 8653 - protein, 16 aa, Artificial Sequence
  source: /note="Description of Artificial Sequence: Synthetic peptide"
  MOD_RES (5)..(5): Citrulline
LAPTXGAVMEQGTSSS

SEQ ID NO: 8654 - protein, 16 aa, Artificial Sequence
  source: /note="Description of Artificial Sequence: Synthetic peptide"
  MOD_RES (9)..(9): Citrulline
  MOD_RES (13)..(13): Citrulline
CCGHSTQPXGGQXVGS

SEQ ID NO: 8655 - protein, 16 aa, Artificial Sequence
  source: /note="Description of Artificial Sequence: Synthetic peptide"
  MOD_RES (5)..(5): Citrulline
  MOD_RES (9)..(9): Citrulline
STQPXGGQXVGSKTAS

SEQ ID NO: 8656 - protein, 16 aa, Artificial Sequence
  source: /note="Description of Artificial Sequence: Synthetic peptide"
  MOD_RES (11)..(12): Citrulline
WGPEQVCSFLXXGGFE

SEQ ID NO: 8657 - protein, 16 aa, Artificial Sequence
  source: /note="Description of Artificial Sequence: Synthetic peptide"
  MOD_RES (7)..(8): Citrulline
QVCSFLXXGGFEEPVL

SEQ ID NO: 8658 - protein, 16 aa, Artificial Sequence
  source: /note="Description of Artificial Sequence: Synthetic peptide"
  MOD_RES (9)..(9): Citrulline
  MOD_RES (13)..(13): Citrulline
PEPEAETAXGTSXGQY

SEQ ID NO: 8659 - protein, 16 aa, Artificial Sequence
  source: /note="Description of Artificial Sequence: Synthetic peptide"
  MOD_RES (5)..(5): Citrulline
  MOD_RES (9)..(9): Citrulline
AETAXGTSXGQYHTLQ

SEQ ID NO: 8660 - protein, 16 aa, Artificial Sequence
  source: /note="Description of Artificial Sequence: Synthetic peptide"
  MOD_RES (1)..(1): Citrulline
  MOD_RES (5)..(5): Citrulline
XGTSXGQYHTLQAGFS

SEQ ID NO: 8661 - protein, 16 aa, Artificial Sequence
  source: /note="Description of Artificial Sequence: Synthetic peptide"
  MOD_RES (4)..(4): Citrulline
  MOD_RES (11)..(11): Citrulline
MPTXPVSFHEXGGVGS

SEQ ID NO: 8662 - protein, 16 aa, Artificial Sequence
  source: /note="Description of Artificial Sequence: Synthetic peptide"
  MOD_RES (7)..(7): Citrulline
  MOD_RES (13)..(13): Citrulline
PVSFHEXGGVGSXADY

SEQ ID NO: 8663 - protein, 16 aa, Artificial Sequence
  source: /note="Description of Artificial Sequence: Synthetic peptide"
  MOD_RES (9)..(9): Citrulline
  MOD_RES (13)..(13): Citrulline
YKCNVCGNXFTTXGNL

SEQ ID NO: 8664 - protein, 16 aa, Artificial Sequence
  source: /note="Description of Artificial Sequence: Synthetic peptide"
  MOD_RES (5)..(5): Citrulline
  MOD_RES (9)..(9): Citrulline
VCGNXFTTXGNLKVHF

SEQ ID NO: 8665 - protein, 16 aa, Artificial Sequence
  source: /note="Description of Artificial Sequence: Synthetic peptide"
  MOD_RES (9)..(9): Citrulline
SSNLTEMSXGVKLLAA

SEQ ID NO: 8666 - protein, 16 aa, Artificial Sequence
  source: /note="Description of Artificial Sequence: Synthetic peptide"
  MOD_RES (5)..(5): Citrulline
TEMSXGVKLLAALLED

SEQ ID NO: 8667 - protein, 16 aa, Artificial Sequence
  source: /note="Description of Artificial Sequence: Synthetic peptide"
  MOD_RES (2)..(2): Citrulline
  MOD_RES (9)..(9): Citrulline
DXLATVQAXGTQASHQ

SEQ ID NO: 8668 - protein, 16 aa, Artificial Sequence
  source: /note="Description of Artificial Sequence: Synthetic peptide"
  MOD_RES (5)..(5): Citrulline
  MOD_RES (15)..(15): Citrulline
TVQAXGTQASHQVLXD

SEQ ID NO: 8669 - protein, 16 aa, Artificial Sequence
  source: /note="Description of Artificial Sequence: Synthetic peptide"
  MOD_RES (15)..(15): Citrulline
SKFLQGVGFNPFQEXG

SEQ ID NO: 8670 - protein, 16 aa, Artificial Sequence
  source: /note="Description of Artificial Sequence: Synthetic peptide"
  MOD_RES (11)..(11): Citrulline
QGVGFNPFQEXGNNIV

SEQ ID NO: 8671 - protein, 16 aa, Artificial Sequence
  source: /note="Description of Artificial Sequence: Synthetic peptide"
  MOD_RES (11)..(11): Citrulline
PSPVLPSNLSXGMSIY

SEQ ID NO: 8672 - protein, 16 aa, Artificial Sequence
  source: /note="Description of Artificial Sequence: Synthetic peptide"
  MOD_RES (7)..(7): Citrulline
LPSNLSXGMSIYPGYM

SEQ ID NO: 8673 - protein, 16 aa, Artificial Sequence
  source: /note="Description of Artificial Sequence: Synthetic peptide"
  MOD_RES (5)..(5): Citrulline
  MOD_RES (7)..(7): Citrulline
FPTSXAXGSPGDTKGG

SEQ ID NO: 8674 - protein, 16 aa, Artificial Sequence
  source: /note="Description of Artificial Sequence: Synthetic peptide"
  MOD_RES (6)..(6): Citrulline
  MOD_RES (9)..(9): Citrulline
VVVSYXPAXGVLQPDT

SEQ ID NO: 8675 - protein, 16 aa, Artificial Sequence
  source: /note="Description of Artificial Sequence: Synthetic peptide"
  MOD_RES (11)..(11): Citrulline
EPTTCHTVKLXGAPFN

SEQ ID NO: 8676 - protein, 16 aa, Artificial Sequence
  source: /note="Description of Artificial Sequence: Synthetic peptide"
  MOD_RES (7)..(7): Citrulline
CHTVKLXGAPFNVTEK

SEQ ID NO: 8677 - protein, 16 aa, Artificial Sequence
  source: /note="Description of Artificial Sequence: Synthetic peptide"
  MOD_RES (3)..(3): Citrulline
KLXGAPFNVTEKNVME

SEQ ID NO: 8678 - protein, 16 aa, Artificial Sequence
  source: /note="Description of Artificial Sequence: Synthetic peptide"
  MOD_RES (1)..(1): Citrulline
  MOD_RES (6)..(6): Citrulline
XSLDTXGDLAKLFTFD

SEQ ID NO: 8679 - protein, 16 aa, Artificial Sequence
  source: /note="Description of Artificial Sequence: Synthetic peptide"
  MOD_RES (5)..(5): Citrulline
LSKAXGSPPTSSNIVQ

SEQ ID NO: 8680 - protein, 16 aa, Artificial Sequence
  source: /note="Description of Artificial Sequence: Synthetic peptide"
  MOD_RES (7)..(7): Citrulline
GISTLEXGQKPPPTPS

SEQ ID NO: 8681 - protein, 16 aa, Artificial Sequence
  source: /note="Description of Artificial Sequence: Synthetic peptide"
  MOD_RES (3)..(3): Citrulline
LEXGQKPPPTPSGKLV

SEQ ID NO: 8682 - protein, 16 aa, Artificial Sequence
  source: /note="Description of Artificial Sequence: Synthetic peptide"
  MOD_RES (9)..(9): Citrulline
  MOD_RES (11)..(11): Citrulline
NGTENSCSXTXGWLQQ

SEQ ID NO: 8683 - protein, 16 aa, Artificial Sequence
  source: /note="Description of Artificial Sequence: Synthetic peptide"
  MOD_RES (5)..(5): Citrulline
  MOD_RES (7)..(7): Citrulline
NSCSXTXGWLQQDNDA

SEQ ID NO: 8684 - protein, 16 aa, Artificial Sequence
  source: /note="Description of Artificial Sequence: Synthetic peptide"
  MOD_RES (1)..(1): Citrulline
  MOD_RES (3)..(3): Citrulline
XTXGWLQQDNDAKPWL

SEQ ID NO: 8685 - protein, 16 aa, Artificial Sequence
  source: /note="Description of Artificial Sequence: Synthetic peptide"
  MOD_RES (1)..(1): Citrulline
  MOD_RES (14)..(14): Citrulline
XGLNGTKPVPPIPXGI

SEQ ID NO: 8686 - protein, 16 aa, Artificial Sequence
  source: /note="Description of Artificial Sequence: Synthetic peptide"
  MOD_RES (10)..(10): Citrulline
GTKPVPPIPXGISLLP

SEQ ID NO: 8687 - protein, 16 aa, Artificial Sequence
  source: /note="Description of Artificial Sequence: Synthetic peptide"
  MOD_RES (6)..(6): Citrulline
VPPIPXGISLLPDKAD

SEQ ID NO: 8688 - protein, 16 aa, Artificial Sequence
  source: /note="Description of Artificial Sequence: Synthetic peptide"
  MOD_RES (2)..(2): Citrulline
PXGISLLPDKADLSTV

SEQ ID NO: 8689 - protein, 16 aa, Artificial Sequence
  source: /note="Description of Artificial Sequence: Synthetic peptide"
  MOD_RES (9)..(9): Citrulline
KATEAGLKXGDQILEV

SEQ ID NO: 8690 - protein, 16 aa, Artificial Sequence
  source: /note="Description of Artificial Sequence: Synthetic peptide"
  MOD_RES (5)..(5): Citrulline
AGLKXGDQILEVNGQN

SEQ ID NO: 8691 - protein, 16 aa, Artificial Sequence
  source: /note="Description of Artificial Sequence: Synthetic peptide"
  MOD_RES (1)..(1): Citrulline
XGDQILEVNGQNFENI

SEQ ID NO: 8692 - protein, 16 aa, Artificial Sequence
  source: /note="Description of Artificial Sequence: Synthetic peptide"
  MOD_RES (6)..(6): Citrulline
AADSGXGSWTSCSSGS

SEQ ID NO: 8693 - protein, 16 aa, Artificial Sequence
  source: /note="Description of Artificial Sequence: Synthetic peptide"
  MOD_RES (1)..(1): Citrulline
  MOD_RES (12)..(12): Citrulline
XSHTLSGGCGGXGSKV

SEQ ID NO: 8694 - protein, 16 aa, Artificial Sequence
  source: /note="Description of Artificial Sequence: Synthetic peptide"
  MOD_RES (8)..(8): Citrulline
LSGGCGGXGSKVALLP

SEQ ID NO: 8695 - protein, 16 aa, Artificial Sequence
  source: /note="Description of Artificial Sequence: Synthetic peptide"
  MOD_RES (4)..(4): Citrulline
CGGXGSKVALLPAGGA

SEQ ID NO: 8696 - protein, 16 aa, Artificial Sequence
  source: /note="Description of Artificial Sequence: Synthetic peptide"
  MOD_RES (11)..(11): Citrulline
LQASQPPDPHXGAKVI

SEQ ID NO: 8697 - protein, 16 aa, Artificial Sequence
  source: /note="Description of Artificial Sequence: Synthetic peptide"
  MOD_RES (7)..(7): Citrulline
  MOD_RES (13)..(13): Citrulline
QPPDPHXGAKVIXADP

SEQ ID NO: 8698 - protein, 16 aa, Artificial Sequence
  source: /note="Description of Artificial Sequence: Synthetic peptide"
  MOD_RES (12)..(12): Citrulline
SVPSSGSPFITXSSPP

SEQ ID NO: 8699 - protein, 16 aa, Artificial Sequence
  source: /note="Description of Artificial Sequence: Synthetic peptide"
  MOD_RES (8)..(8): Citrulline
SGSPFITXSSPPKDSE

SEQ ID NO: 8700 - protein, 16 aa, Artificial Sequence
  source: /note="Description of Artificial Sequence: Synthetic peptide"
  MOD_RES (4)..(4): Citrulline
FITXSSPPKDSEVEQN

SEQ ID NO: 8701 - protein, 16 aa, Artificial Sequence
  source: /note="Description of Artificial Sequence: Synthetic peptide"
  MOD_RES (10)..(10): Citrulline
MSLSDTMTLXGSVQNK

SEQ ID NO: 8702 - protein, 16 aa, Artificial Sequence
  source: /note="Description of Artificial Sequence: Synthetic peptide"
  MOD_RES (6)..(6): Citrulline
  MOD_RES (16)..(16): Citrulline
DTMTLXGSVQNKLNPX

SEQ ID NO: 8703 - protein, 16 aa, Artificial Sequence
  source: /note="Description of Artificial Sequence: Synthetic peptide"
  MOD_RES (4)..(4): Citrulline
  MOD_RES (10)..(10): Citrulline
ENAXLLAQKXGALQGS

SEQ ID NO: 8704 - protein, 16 aa, Artificial Sequence
  source: /note="Description of Artificial Sequence: Synthetic peptide"
  MOD_RES (6)..(6): Citrulline
LLAQKXGALQGSAWQV

SEQ ID NO: 8705 - protein, 16 aa, Artificial Sequence
  source: /note="Description of Artificial Sequence: Synthetic peptide"
  MOD_RES (6)..(7): Citrulline
SSILPXXGALLKVNQE

SEQ ID NO: 8706 - protein, 16 aa, Artificial Sequence
  source: /note="Description of Artificial Sequence: Synthetic peptide"
  MOD_RES (2)..(3): Citrulline
PXXGALLKVNQELAGY

SEQ ID NO: 8707 - protein, 16 aa, Artificial Sequence
  source: /note="Description of Artificial Sequence: Synthetic peptide"
  MOD_RES (5)..(5): Citrulline
  MOD_RES (15)..(15): Citrulline
PHVAXGPCGSLSGVXG

SEQ ID NO: 8708 - protein, 16 aa, Artificial Sequence
  source: /note="Description of Artificial Sequence: Synthetic peptide"
  MOD_RES (1)..(1): Citrulline
  MOD_RES (11)..(11): Citrulline
XGPCGSLSGVXGNQAQ

SEQ ID NO: 8709 - protein, 16 aa, Artificial Sequence
  source: /note="Description of Artificial Sequence: Synthetic peptide"
  MOD_RES (13)..(13): Citrulline
VGACASSSTQSTXGGH

SEQ ID NO: 8710 - protein, 16 aa, Artificial Sequence
  source: /note="Description of Artificial Sequence: Synthetic peptide"
  MOD_RES (9)..(9): Citrulline
ASSSTQSTXGGHADNG

SEQ ID NO: 8711 - protein, 16 aa, Artificial Sequence
  source: /note="Description of Artificial Sequence: Synthetic peptide"
  MOD_RES (5)..(5): Citrulline
ILLYXGADKDVKNNNG

SEQ ID NO: 8712 - protein, 16 aa, Artificial Sequence
  source: /note="Description of Artificial Sequence: Synthetic peptide"
  MOD_RES (11)..(11): Citrulline
KDSEGFGFVLXGAKAQ

SEQ ID NO: 8713 - protein, 16 aa, Artificial Sequence
  source: /note="Description of Artificial Sequence: Synthetic peptide"
  MOD_RES (7)..(7): Citrulline
GFGFVLXGAKAQTPIE

SEQ ID NO: 8714 - protein, 16 aa, Artificial Sequence
  source: /note="Description of Artificial Sequence: Synthetic peptide"
  MOD_RES (3)..(3): Citrulline
VLXGAKAQTPIEEFTP

SEQ ID NO: 8715 - protein, 16 aa, Artificial Sequence
  source: /note="Description of Artificial Sequence: Synthetic peptide"
  MOD_RES (4)..(4): Citrulline
  MOD_RES (10)..(10): Citrulline
SSGXLTPSPXGGPFNP

SEQ ID NO: 8716 - protein, 16 aa, Artificial Sequence
  source: /note="Description of Artificial Sequence: Synthetic peptide"
  MOD_RES (6)..(6): Citrulline
LTPSPXGGPFNPGSGG

SEQ ID NO: 8717 - protein, 16 aa, Artificial Sequence
  source: /note="Description of Artificial Sequence: Synthetic peptide"
  MOD_RES (2)..(2): Citrulline
PXGGPFNPGSGGPLPA

SEQ ID NO: 8718 - protein, 16 aa, Artificial Sequence
  source: /note="Description of Artificial Sequence: Synthetic peptide"
  MOD_RES (8)..(8): Citrulline
  MOD_RES (11)..(11): Citrulline
LGPQPSLXGWXGGGPS

SEQ ID NO: 8719 - protein, 16 aa, Artificial Sequence
  source: /note="Description of Artificial Sequence: Synthetic peptide"
  MOD_RES (4)..(4): Citrulline
  MOD_RES (7)..(7): Citrulline
PSLXGWXGGGPSPTPG

SEQ ID NO: 8720 - protein, 16 aa, Artificial Sequence
  source: /note="Description of Artificial Sequence: Synthetic peptide"
  MOD_RES (10)..(10): Citrulline
  MOD_RES (12)..(12): Citrulline
PQLMTPSKLXGXALGA

SEQ ID NO: 8721 - protein, 16 aa, Artificial Sequence
  source: /note="Description of Artificial Sequence: Synthetic peptide"
  MOD_RES (6)..(6): Citrulline
  MOD_RES (8)..(8): Citrulline
TPSKLXGXALGASGGL

SEQ ID NO: 8722 - protein, 16 aa, Artificial Sequence
  source: /note="Description of Artificial Sequence: Synthetic peptide"
  MOD_RES (8)..(8): Citrulline
YPGLFDIXGSPTGGAG

SEQ ID NO: 8723 - protein, 16 aa, Artificial Sequence
  source: /note="Description of Artificial Sequence: Synthetic peptide"
  MOD_RES (4)..(4): Citrulline
FDIXGSPTGGAGGSAD

SEQ ID NO: 8724 - protein, 16 aa, Artificial Sequence
  source: /note="Description of Artificial Sequence: Synthetic peptide"
  MOD_RES (9)..(9): Citrulline
DCVKILCDXGAKLNCY

SEQ ID NO: 8725 - protein, 16 aa, Artificial Sequence
  source: /note="Description of Artificial Sequence: Synthetic peptide"
  MOD_RES (5)..(5): Citrulline
ILCDXGAKLNCYSLSG

SEQ ID NO: 8726 - protein, 16 aa, Artificial Sequence
  source: /note="Description of Artificial Sequence: Synthetic peptide"
  MOD_RES (13)..(13): Citrulline
NCNGPVNTQGFYXGSP

SEQ ID NO: 8727 - protein, 16 aa, Artificial Sequence
  source: /note="Description of Artificial Sequence: Synthetic peptide"
  MOD_RES (9)..(9): Citrulline
PVNTQGFYXGSPGCVM

SEQ ID NO: 8728 - protein, 16 aa, Artificial Sequence
  source: /note="Description of Artificial Sequence: Synthetic peptide"
  MOD_RES (4)..(4): Citrulline
  MOD_RES (9)..(9): Citrulline
NGFXFTSVXGDKVDIL

SEQ ID NO: 8729 - protein, 16 aa, Artificial Sequence
  source: /note="Description of Artificial Sequence: Synthetic peptide"
  MOD_RES (5)..(5): Citrulline
FTSVXGDKVDILYNNI

SEQ ID NO: 8730 - protein, 16 aa, Artificial Sequence
  source: /note="Description of Artificial Sequence: Synthetic peptide"
  MOD_RES (10)..(10): Citrulline
  MOD_RES (13)..(13): Citrulline
GLGVGELATXGAXMHY

SEQ ID NO: 8731 - protein, 16 aa, Artificial Sequence
  source: /note="Description of Artificial Sequence: Synthetic peptide"
  MOD_RES (6)..(6): Citrulline
  MOD_RES (9)..(9): Citrulline
GELATXGAXMHYKGNK

SEQ ID NO: 8732 - protein, 16 aa, Artificial Sequence
  source: /note="Description of Artificial Sequence: Synthetic peptide"
  MOD_RES (10)..(10): Citrulline
  MOD_RES (13)..(13): Citrulline
GLEVSELSSXGAXVVS

SEQ ID NO: 8733 - protein, 16 aa, Artificial Sequence
  source: /note="Description of Artificial Sequence: Synthetic peptide"
  MOD_RES (6)..(6): Citrulline
  MOD_RES (9)..(9): Citrulline
SELSSXGAXVVSNDNK

SEQ ID NO: 8734 - protein, 16 aa, Artificial Sequence
  source: /note="Description of Artificial Sequence: Synthetic peptide"
  MOD_RES (10)..(10): Citrulline
  MOD_RES (13)..(13): Citrulline
GLEVGKLAAXGAXLVS

SEQ ID NO: 8735 - protein, 16 aa, Artificial Sequence
  source: /note="Description of Artificial Sequence: Synthetic peptide"
  MOD_RES (6)..(6): Citrulline
  MOD_RES (9)..(9): Citrulline
GKLAAXGAXLVSEGNK

SEQ ID NO: 8736 - protein, 16 aa, Artificial Sequence
  source: /note="Description of Artificial Sequence: Synthetic peptide"
  MOD_RES (3)..(3): Citrulline
  MOD_RES (8)..(8): Citrulline
EVXCSLSXGVPFKIHS

SEQ ID NO: 8737 - protein, 16 aa, Artificial Sequence
  source: /note="Description of Artificial Sequence: Synthetic peptide"
  MOD_RES (4)..(4): Citrulline
SLSXGVPFKIHSSSNN

SEQ ID NO: 8738 - protein, 16 aa, Artificial Sequence
  source: /note="Description of Artificial Sequence: Synthetic peptide"
  MOD_RES (7)..(7): Citrulline
IPEELDXGSLVGNLAK

SEQ ID NO: 8739 - protein, 16 aa, Artificial Sequence
  source: /note="Description of Artificial Sequence: Synthetic peptide"
  MOD_RES (3)..(3): Citrulline
LDXGSLVGNLAKDLGF

SEQ ID NO: 8740 - protein, 16 aa, Artificial Sequence
  source: /note="Description of Artificial Sequence: Synthetic peptide"
  MOD_RES (7)..(7): Citrulline
VLENNPXGASIFSVNA

SEQ ID NO: 8741 - protein, 16 aa, Artificial Sequence
  source: /note="Description of Artificial Sequence: Synthetic peptide"
  MOD_RES (3)..(3): Citrulline
NPXGASIFSVNALDPD

SEQ ID NO: 8742 - protein, 16 aa, Artificial Sequence
  source: /note="Description of Artificial Sequence: Synthetic peptide"
  MOD_RES (11)..(11): Citrulline
YSAYIPENNPXGASIL

SEQ ID NO: 8743 - protein, 16 aa, Artificial Sequence
  source: /note="Description of Artificial Sequence: Synthetic peptide"
  MOD_RES (7)..(7): Citrulline
IPENNPXGASILSMTA

SEQ ID NO: 8744 - protein, 16 aa, Artificial Sequence
  source: /note="Description of Artificial Sequence: Synthetic peptide"
  MOD_RES (3)..(3): Citrulline
NPXGASILSMTAQDPD

SEQ ID NO: 8745 - protein, 16 aa, Artificial Sequence
  source: /note="Description of Artificial Sequence: Synthetic peptide"
  MOD_RES (11)..(11): Citrulline
YSAYIPENNPXGASIF

SEQ ID NO: 8746 - protein, 16 aa, Artificial Sequence
  source: /note="Description of Artificial Sequence: Synthetic peptide"
  MOD_RES (5)..(5): Citrulline
EEIDXGSFVGNIAKDL

SEQ ID NO: 8747 - protein, 16 aa, Artificial Sequence
  source: /note="Description of Artificial Sequence: Synthetic peptide"
  MOD_RES (2)..(2): Citrulline
  MOD_RES (6)..(6): Citrulline
VXIVSXGKTQLFAVNP

SEQ ID NO: 8748 - protein, 16 aa, Artificial Sequence
  source: /note="Description of Artificial Sequence: Synthetic peptide"
  MOD_RES (2)..(2): Citrulline
  MOD_RES (13)..(13): Citrulline
SXGKTQLFAVNPXSGS

SEQ ID NO: 8749 - protein, 16 aa, Artificial Sequence
  source: /note="Description of Artificial Sequence: Synthetic peptide"
  MOD_RES (13)..(13): Citrulline
FQLDSQTGEVQVXGSL

SEQ ID NO: 8750 - protein, 16 aa, Artificial Sequence
  source: /note="Description of Artificial Sequence: Synthetic peptide"
  MOD_RES (9)..(9): Citrulline
SQTGEVQVXGSLDFEK

SEQ ID NO: 8751 - protein, 16 aa, Artificial Sequence
  source: /note="Description of Artificial Sequence: Synthetic peptide"
  MOD_RES (5)..(5): Citrulline
  MOD_RES (14)..(14): Citrulline
EVQVXGSLDFEKYXFY

SEQ ID NO: 8752 - protein, 16 aa, Artificial Sequence
  source: /note="Description of Artificial Sequence: Synthetic peptide"
  MOD_RES (12)..(12): Citrulline
SYSAYIPENNPXGASI

SEQ ID NO: 8753 - protein, 16 aa, Artificial Sequence
  source: /note="Description of Artificial Sequence: Synthetic peptide"
  MOD_RES (7)..(7): Citrulline
  MOD_RES (15)..(15): Citrulline
IPENNPXGASIFSVXA

SEQ ID NO: 8754 - protein, 16 aa, Artificial Sequence
  source: /note="Description of Artificial Sequence: Synthetic peptide"
  MOD_RES (2)..(2): Citrulline
  MOD_RES (11)..(11): Citrulline
PXLFQLDSKGXGDLLE

SEQ ID NO: 8755 - protein, 16 aa, Artificial Sequence
  source: /note="Description of Artificial Sequence: Synthetic peptide"
  MOD_RES (7)..(7): Citrulline
QLDSKGXGDLLEVNLQ

SEQ ID NO: 8756 - protein, 16 aa, Artificial Sequence
  source: /note="Description of Artificial Sequence: Synthetic peptide"
  MOD_RES (3)..(3): Citrulline
KGXGDLLEVNLQNGIL

SEQ ID NO: 8757 - protein, 16 aa, Artificial Sequence
  source: /note="Description of Artificial Sequence: Synthetic peptide"
  MOD_RES (10)..(10): Citrulline
KETGEAGWWXGELNGK

SEQ ID NO: 8758 - protein, 16 aa, Artificial Sequence
  source: /note="Description of Artificial Sequence: Synthetic peptide"
  MOD_RES (6)..(6): Citrulline
EAGWWXGELNGKEGVF

SEQ ID NO: 8759 - protein, 16 aa, Artificial Sequence
  source: /note="Description of Artificial Sequence: Synthetic peptide"
  MOD_RES (2)..(2): Citrulline
WXGELNGKEGVFPDNF

SEQ ID NO: 8760 - protein, 16 aa, Artificial Sequence
  source: /note="Description of Artificial Sequence: Synthetic peptide"
  MOD_RES (11)..(11): Citrulline
  MOD_RES (14)..(14): Citrulline
HTLTQYPFDFXGAXIL

SEQ ID NO: 8761 - protein, 16 aa, Artificial Sequence
  source: /note="Description of Artificial Sequence: Synthetic peptide"
  MOD_RES (7)..(7): Citrulline
  MOD_RES (10)..(10): Citrulline
QYPFDFXGAXILSGQE

SEQ ID NO: 8762 - protein, 16 aa, Artificial Sequence
  source: /note="Description of Artificial Sequence: Synthetic peptide"
  MOD_RES (8)..(8): Citrulline
PFHGHVGXGAFSDVYE

SEQ ID NO: 8763 - protein, 16 aa, Artificial Sequence
  source: /note="Description of Artificial Sequence: Synthetic peptide"
  MOD_RES (4)..(4): Citrulline
HVGXGAFSDVYEPAED

SEQ ID NO: 8764 - protein, 16 aa, Artificial Sequence
  source: /note="Description of Artificial Sequence: Synthetic peptide"
  MOD_RES (8)..(8): Citrulline
TESCFSDXGSLKSIMQ

SEQ ID NO: 8765 - protein, 16 aa, Artificial Sequence
  source: /note="Description of Artificial Sequence: Synthetic peptide"
  MOD_RES (4)..(4): Citrulline
FSDXGSLKSIMQSNTL

SEQ ID NO: 8766 - protein, 16 aa, Artificial Sequence
  source: /note="Description of Artificial Sequence: Synthetic peptide"
  MOD_RES (11)..(11): Citrulline
LPATVQPFHLXGMSST

SEQ ID NO: 8767 - protein, 16 aa, Artificial Sequence
  source: /note="Description of Artificial Sequence: Synthetic peptide"
  MOD_RES (7)..(7): Citrulline
  MOD_RES (16)..(16): Citrulline
VQPFHLXGMSSTFSQX

SEQ ID NO: 8768 - protein, 16 aa, Artificial Sequence
  source: /note="Description of Artificial Sequence: Synthetic peptide"
  MOD_RES (14)..(14): Citrulline
DGGGGYGCAPGLTXGP

SEQ ID NO: 8769 - protein, 16 aa, Artificial Sequence
  source: /note="Description of Artificial Sequence: Synthetic peptide"
  MOD_RES (10)..(10): Citrulline
  MOD_RES (13)..(13): Citrulline
GYGCAPGLTXGPXGLK

SEQ ID NO: 8770 - protein, 16 aa, Artificial Sequence
  source: /note="Description of Artificial Sequence: Synthetic peptide"
  MOD_RES (11)..(11): Citrulline
PLAKGYLPLPXGAPVG

SEQ ID NO: 8771 - protein, 16 aa, Artificial Sequence
  source: /note="Description of Artificial Sequence: Synthetic peptide"
  MOD_RES (7)..(7): Citrulline
GYLPLPXGAPVGKESV

SEQ ID NO: 8772 - protein, 16 aa, Artificial Sequence
  source: /note="Description of Artificial Sequence: Synthetic peptide"
  MOD_RES (3)..(3): Citrulline
LPXGAPVGKESVELQN

SEQ ID NO: 8773 - protein, 16 aa, Artificial Sequence
  source: /note="Description of Artificial Sequence: Synthetic peptide"
  MOD_RES (9)..(9): Citrulline
  MOD_RES (15)..(15): Citrulline
SCSFGLHAXGVELMXF

SEQ ID NO: 8774 - protein, 16 aa, Artificial Sequence
  source: /note="Description of Artificial Sequence: Synthetic peptide"
  MOD_RES (5)..(5): Citrulline
  MOD_RES (11)..(11): Citrulline
GLHAXGVELMXFTTPG

SEQ ID NO: 8775 - protein, 16 aa, Artificial Sequence
  source: /note="Description of Artificial Sequence: Synthetic peptide"
  MOD_RES (10)..(10): Citrulline
VFPGDHESHXGSLLLG

SEQ ID NO: 8776 - protein, 16 aa, Artificial Sequence
  source: /note="Description of Artificial Sequence: Synthetic peptide"
  MOD_RES (6)..(6): Citrulline
DHESHXGSLLLGGGAG

SEQ ID NO: 8777 - protein, 16 aa, Artificial Sequence
  source: /note="Description of Artificial Sequence: Synthetic peptide"
  MOD_RES (2)..(2): Citrulline
HXGSLLLGGGAGQQGP

SEQ ID NO: 8778 - protein, 16 aa, Artificial Sequence
  source: /note="Description of Artificial Sequence: Synthetic peptide"
  MOD_RES (14)..(14): Citrulline
SATSFPPSYESVTXGL

SEQ ID NO: 8779 - protein, 16 aa, Artificial Sequence
  source: /note="Description of Artificial Sequence: Synthetic peptide"
  MOD_RES (10)..(10): Citrulline
  MOD_RES (15)..(15): Citrulline
FPPSYESVTXGLSDXV

SEQ ID NO: 8780 - protein, 16 aa, Artificial Sequence
  source: /note="Description of Artificial Sequence: Synthetic peptide"
  MOD_RES (8)..(8): Citrulline
  MOD_RES (12)..(12): Citrulline
QQPGSSPXGKSXSPAP

SEQ ID NO: 8781 - protein, 16 aa, Artificial Sequence
  source: /note="Description of Artificial Sequence: Synthetic peptide"
  MOD_RES (8)..(8): Citrulline
AQEASVLXGTALGSVP

SEQ ID NO: 8782 - protein, 16 aa, Artificial Sequence
  source: /note="Description of Artificial Sequence: Synthetic peptide"
  MOD_RES (4)..(4): Citrulline
SVLXGTALGSVPGGSI

SEQ ID NO: 8783 - protein, 16 aa, Artificial Sequence
  source: /note="Description of Artificial Sequence: Synthetic peptide"
  MOD_RES (8)..(8): Citrulline
LKEQHHIXGSITQGIP

SEQ ID NO: 8784 - protein, 16 aa, Artificial Sequence
  source: /note="Description of Artificial Sequence: Synthetic peptide"
  MOD_RES (12)..(12): Citrulline
GTASSSGGSIAXGAPV

SEQ ID NO: 8785 - protein, 16 aa, Artificial Sequence
  source: /note="Description of Artificial Sequence: Synthetic peptide"
  MOD_RES (8)..(8): Citrulline
SSGGSIAXGAPVIVPE

SEQ ID NO: 8786 - protein, 16 aa, Artificial Sequence
  source: /note="Description of Artificial Sequence: Synthetic peptide"
  MOD_RES (4)..(4): Citrulline
SIAXGAPVIVPELGKP

SEQ ID NO: 8787 - protein, 16 aa, Artificial Sequence
  source: /note="Description of Artificial Sequence: Synthetic peptide"
  MOD_RES (12)..(12): Citrulline
DHGAPFAGHLPXGSPV

SEQ ID NO: 8788 - protein, 16 aa, Artificial Sequence
  source: /note="Description of Artificial Sequence: Synthetic peptide"
  MOD_RES (8)..(8): Citrulline
  MOD_RES (15)..(15): Citrulline
PFAGHLPXGSPVTTXE

SEQ ID NO: 8789 - protein, 16 aa, Artificial Sequence
  source: /note="Description of Artificial Sequence: Synthetic peptide"
  MOD_RES (11)..(11): Citrulline
PLAFDPTSIPXGIPLD

SEQ ID NO: 8790 - protein, 16 aa, Artificial Sequence
  source: /note="Description of Artificial Sequence: Synthetic peptide"
  MOD_RES (7)..(7): Citrulline
DPTSIPXGIPLDAAAA

SEQ ID NO: 8791 - protein, 16 aa, Artificial Sequence
  source: /note="Description of Artificial Sequence: Synthetic peptide"
  MOD_RES (11)..(11): Citrulline
EKDAMVSQLSXGKQAF

SEQ ID NO: 8792 - protein, 16 aa, Artificial Sequence
  source: /note="Description of Artificial Sequence: Synthetic peptide"
  MOD_RES (7)..(7): Citrulline
MVSQLSXGKQAFTQQI

SEQ ID NO: 8793 - protein, 16 aa, Artificial Sequence
  source: /note="Description of Artificial Sequence: Synthetic peptide"
  MOD_RES (10)..(10): Citrulline
TGGAGFCLSXGLALKM

SEQ ID NO: 8794 - protein, 16 aa, Artificial Sequence
  source: /note="Description of Artificial Sequence: Synthetic peptide"
  MOD_RES (6)..(6): Citrulline
GFCLSXGLALKMSPWA

SEQ ID NO: 8795 - protein, 16 aa, Artificial Sequence
  source: /note="Description of Artificial Sequence: Synthetic peptide"
  MOD_RES (2)..(2): Citrulline
SXGLALKMSPWASLGS

SEQ ID NO: 8796 - protein, 16 aa, Artificial Sequence
  source: /note="Description of Artificial Sequence: Synthetic peptide"
  MOD_RES (2)..(2): Citrulline
  MOD_RES (6)..(6): Citrulline
MXLQAXGGPSPLKSNS

SEQ ID NO: 8797 - protein, 16 aa, Artificial Sequence
  source: /note="Description of Artificial Sequence: Synthetic peptide"
  MOD_RES (10)..(10): Citrulline
YGLAGGAGGXGELLAA

SEQ ID NO: 8798 - protein, 16 aa, Artificial Sequence
  source: /note="Description of Artificial Sequence: Synthetic peptide"
  MOD_RES (6)..(6): Citrulline
GGAGGXGELLAATLKG

SEQ ID NO: 8799 - protein, 16 aa, Artificial Sequence
  source: /note="Description of Artificial Sequence: Synthetic peptide"
  MOD_RES (7)..(7): Citrulline
YKYIEYXGAEKEWGDG

SEQ ID NO: 8800 - protein, 16 aa, Artificial Sequence
  source: /note="Description of Artificial Sequence: Synthetic peptide"
  MOD_RES (3)..(3): Citrulline
  MOD_RES (14)..(14): Citrulline
EYXGAEKEWGDGIXGL

SEQ ID NO: 8801 - protein, 16 aa, Artificial Sequence
  source: /note="Description of Artificial Sequence: Synthetic peptide"
  MOD_RES (10)..(10): Citrulline
AEKEWGDGIXGLSLNA

SEQ ID NO: 8802 - protein, 16 aa, Artificial Sequence
  source: /note="Description of Artificial Sequence: Synthetic peptide"
  MOD_RES (6)..(6): Citrulline
  MOD_RES (14)..(14): Citrulline
WGDGIXGLSLNAAXYA

SEQ ID NO: 8803 - protein, 16 aa, Artificial Sequence
  source: /note="Description of Artificial Sequence: Synthetic peptide"
  MOD_RES (4)..(4): Citrulline
  MOD_RES (11)..(11): Citrulline
GAIXMGIFSSXGEKIL

SEQ ID NO: 8804 - protein, 16 aa, Artificial Sequence
  source: /note="Description of Artificial Sequence: Synthetic peptide"
  MOD_RES (7)..(7): Citrulline
MGIFSSXGEKILMADA

SEQ ID NO: 8805 - protein, 16 aa, Artificial Sequence
  source: /note="Description of Artificial Sequence: Synthetic peptide"
  MOD_RES (3)..(3): Citrulline
SSXGEKILMADADGAT

SEQ ID NO: 8806 - protein, 16 aa, Artificial Sequence
  source: /note="Description of Artificial Sequence: Synthetic peptide"
  MOD_RES (5)..(5): Citrulline
  MOD_RES (13)..(13): Citrulline
VCWSXGFMEMNGXGEL

SEQ ID NO: 8807 - protein, 16 aa, Artificial Sequence
  source: /note="Description of Artificial Sequence: Synthetic peptide"
  MOD_RES (1)..(1): Citrulline
  MOD_RES (9)..(9): Citrulline
XGFMEMNGXGELVESL

SEQ ID NO: 8808 - protein, 16 aa, Artificial Sequence
  source: /note="Description of Artificial Sequence: Synthetic peptide"
  MOD_RES (6)..(6): Citrulline
NEALEXGLLKTLQKLD

SEQ ID NO: 8809 - protein, 16 aa, Artificial Sequence
  source: /note="Description of Artificial Sequence: Synthetic peptide"
  MOD_RES (2)..(2): Citrulline
EXGLLKTLQKLDEYLN

SEQ ID NO: 8810 - protein, 16 aa, Artificial Sequence
  source: /note="Description of Artificial Sequence: Synthetic peptide"
  MOD_RES (8)..(8): Citrulline
PMIYENGXGSSHQQQV

SEQ ID NO: 8811 - protein, 16 aa, Artificial Sequence
  source: /note="Description of Artificial Sequence: Synthetic peptide"
  MOD_RES (4)..(4): Citrulline
ENGXGSSHQQQVTCYP

SEQ ID NO: 8812 - protein, 16 aa, Artificial Sequence
  source: /note="Description of Artificial Sequence: Synthetic peptide"
  MOD_RES (8)..(8): Citrulline
DPPMPASXGSYHLDWD

SEQ ID NO: 8813 - protein, 16 aa, Artificial Sequence
  source: /note="Description of Artificial Sequence: Synthetic peptide"
  MOD_RES (4)..(4): Citrulline
PASXGSYHLDWDKMDD

SEQ ID NO: 8814 - protein, 16 aa, Artificial Sequence
  source: /note="Description of Artificial Sequence: Synthetic peptide"
  MOD_RES (10)..(10): Citrulline
  MOD_RES (15)..(15): Citrulline
DCSDPNPMVXGLALXS

SEQ ID NO: 8815 - protein, 16 aa, Artificial Sequence
  source: /note="Description of Artificial Sequence: Synthetic peptide"
  MOD_RES (10)..(11): Citrulline
AGSVTVLSGXXGTELG

SEQ ID NO: 8816 - protein, 16 aa, Artificial Sequence
  source: /note="Description of Artificial Sequence: Synthetic peptide"
  MOD_RES (6)..(7): Citrulline
TVLSGXXGTELGGAAG

SEQ ID NO: 8817 - protein, 16 aa, Artificial Sequence
  source: /note="Description of Artificial Sequence: Synthetic peptide"
  MOD_RES (2)..(3): Citrulline
GXXGTELGGAAGQGGH

SEQ ID NO: 8818 - protein, 16 aa, Artificial Sequence
  source: /note="Description of Artificial Sequence: Synthetic peptide"
  MOD_RES (6)..(6): Citrulline
  MOD_RES (12)..(12): Citrulline
GEQTPXGVLQEXFQVL

SEQ ID NO: 8819 - protein, 16 aa, Artificial Sequence
  source: /note="Description of Artificial Sequence: Synthetic peptide"
  MOD_RES (10)..(11): Citrulline
TFGSIFGYKXXGGVPS

SEQ ID NO: 8820 - protein, 16 aa, Artificial Sequence
  source: /note="Description of Artificial Sequence: Synthetic peptide"
  MOD_RES (6)..(7): Citrulline
IFGYKXXGGVPSLIAG

SEQ ID NO: 8821 - protein, 16 aa, Artificial Sequence
  source: /note="Description of Artificial Sequence: Synthetic peptide"
  MOD_RES (9)..(9): Citrulline
GAFDMSGVXGSLAEAV

SEQ ID NO: 8822 - protein, 16 aa, Artificial Sequence
  source: /note="Description of Artificial Sequence: Synthetic peptide"
  MOD_RES (5)..(5): Citrulline
MSGVXGSLAEAVGSPP

SEQ ID NO: 8823 - protein, 16 aa, Artificial Sequence
  source: /note="Description of Artificial Sequence: Synthetic peptide"
  MOD_RES (3)..(3): Citrulline
  MOD_RES (9)..(9): Citrulline
ASXQLKQWXGELPPEL

SEQ ID NO: 8824 - protein, 16 aa, Artificial Sequence
  source: /note="Description of Artificial Sequence: Synthetic peptide"
  MOD_RES (5)..(5): Citrulline
LKQWXGELPPELVQQM

SEQ ID NO: 8825 - protein, 16 aa, Artificial Sequence
  source: /note="Description of Artificial Sequence: Synthetic peptide"
  MOD_RES (11)..(11): Citrulline
STPTLWDGKKXGDLPG

SEQ ID NO: 8826 - protein, 16 aa, Artificial Sequence
  source: /note="Description of Artificial Sequence: Synthetic peptide"
  MOD_RES (7)..(7): Citrulline
LWDGKKXGDLPGEPVA

SEQ ID NO: 8827 - protein, 16 aa, Artificial Sequence
  source: /note="Description of Artificial Sequence: Synthetic peptide"
  MOD_RES (3)..(3): Citrulline
KKXGDLPGEPVAFPQG

SEQ ID NO: 8828 - protein, 16 aa, Artificial Sequence
  source: /note="Description of Artificial Sequence: Synthetic peptide"
  MOD_RES (10)..(10): Citrulline
  MOD_RES (12)..(12): Citrulline
IKSSVVGSEXKXGMQL

SEQ ID NO: 8829 - protein, 16 aa, Artificial Sequence
  source: /note="Description of Artificial Sequence: Synthetic peptide"
  MOD_RES (14)..(14): Citrulline
TTCIKWSTNNCGTXGS

SEQ ID NO: 8830 - protein, 16 aa, Artificial Sequence
  source: /note="Description of Artificial Sequence: Synthetic peptide"
  MOD_RES (10)..(10): Citrulline
  MOD_RES (14)..(14): Citrulline
KWSTNNCGTXGSCXTY

SEQ ID NO: 8831 - protein, 16 aa, Artificial Sequence
  source: /note="Description of Artificial Sequence: Synthetic peptide"
  MOD_RES (6)..(6): Citrulline
  MOD_RES (10)..(10): Citrulline
NNCGTXGSCXTYNSTS

SEQ ID NO: 8832 - protein, 16 aa, Artificial Sequence
  source: /note="Description of Artificial Sequence: Synthetic peptide"
  MOD_RES (7)..(7): Citrulline
  MOD_RES (11)..(11): Citrulline
LPFFQDXPWAXGTAEA

SEQ ID NO: 8833 - protein, 16 aa, Artificial Sequence
  source: /note="Description of Artificial Sequence: Synthetic peptide"
  MOD_RES (3)..(3): Citrulline
  MOD_RES (7)..(7): Citrulline
QDXPWAXGTAEAAHEC

SEQ ID NO: 8834 - protein, 16 aa, Artificial Sequence
  source: /note="Description of Artificial Sequence: Synthetic peptide"
  MOD_RES (11)..(11): Citrulline
FTFTPTVTYQXGGEAV

SEQ ID NO: 8835 - protein, 16 aa, Artificial Sequence
  source: /note="Description of Artificial Sequence: Synthetic peptide"
  MOD_RES (7)..(7): Citrulline
PTVTYQXGGEAVSSGG

SEQ ID NO: 8836 - protein, 16 aa, Artificial Sequence
  source: /note="Description of Artificial Sequence: Synthetic peptide"
  MOD_RES (7)..(7): Citrulline
  MOD_RES (12)..(12): Citrulline
VSAVYEXGAAEXHGGI

SEQ ID NO: 8837 - protein, 16 aa, Artificial Sequence
  source: /note="Description of Artificial Sequence: Synthetic peptide"
  MOD_RES (9)..(9): Citrulline
  MOD_RES (11)..(11): Citrulline
QQNIMISPXNXGSPKI

SEQ ID NO: 8838 - protein, 16 aa, Artificial Sequence
  source: /note="Description of Artificial Sequence: Synthetic peptide"
  MOD_RES (5)..(5): Citrulline
  MOD_RES (7)..(7): Citrulline
MISPXNXGSPKIASHQ

SEQ ID NO: 8839 - protein, 16 aa, Artificial Sequence
  source: /note="Description of Artificial Sequence: Synthetic peptide"
  MOD_RES (1)..(1): Citrulline
  MOD_RES (3)..(3): Citrulline
XNXGSPKIASHQFSPV

SEQ ID NO: 8840 - protein, 16 aa, Artificial Sequence
  source: /note="Description of Artificial Sequence: Synthetic peptide"
  MOD_RES (5)..(5): Citrulline
  MOD_RES (14)..(14): Citrulline
AHDTXGSSVPENDXLA

SEQ ID NO: 8841 - protein, 16 aa, Artificial Sequence
  source: /note="Description of Artificial Sequence: Synthetic peptide"
  MOD_RES (1)..(1): Citrulline
  MOD_RES (9)..(9): Citrulline
XKVTFKWQXGNKIGEG

SEQ ID NO: 8842 - protein, 16 aa, Artificial Sequence
  source: /note="Description of Artificial Sequence: Synthetic peptide"
  MOD_RES (5)..(5): Citrulline
FKWQXGNKIGEGQYGK

SEQ ID NO: 8843 - protein, 16 aa, Artificial Sequence
  source: /note="Description of Artificial Sequence: Synthetic peptide"
  MOD_RES (1)..(1): Citrulline
XGNKIGEGQYGKVYTC

SEQ ID NO: 8844 - protein, 16 aa, Artificial Sequence
  source: /note="Description of Artificial Sequence: Synthetic peptide"
  MOD_RES (12)..(12): Citrulline
YQCKECGKAFNXGSNL

SEQ ID NO: 8845 - protein, 16 aa, Artificial Sequence
  source: /note="Description of Artificial Sequence: Synthetic peptide"
  MOD_RES (8)..(8): Citrulline
ECGKAFNXGSNLIQHQ

SEQ ID NO: 8846 - protein, 16 aa, Artificial Sequence
  source: /note="Description of Artificial Sequence: Synthetic peptide"
  MOD_RES (4)..(4): Citrulline
AFNXGSNLIQHQKIHS

SEQ ID NO: 8847 - protein, 16 aa, Artificial Sequence
  source: /note="Description of Artificial Sequence: Synthetic peptide"
  MOD_RES (12)..(12): Citrulline
YECKECGKGFNXGANL

SEQ ID NO: 8848 - protein, 16 aa, Artificial Sequence
  source: /note="Description of Artificial Sequence: Synthetic peptide"
  MOD_RES (8)..(8): Citrulline
ECGKGFNXGANLIQHQ

SEQ ID NO: 8849 - protein, 16 aa, Artificial Sequence
  source: /note="Description of Artificial Sequence: Synthetic peptide"
  MOD_RES (4)..(4): Citrulline
GFNXGANLIQHQKIHS

SEQ ID NO: 8850 - protein, 16 aa, Artificial Sequence
  source: /note="Description of Artificial Sequence: Synthetic peptide"
  MOD_RES (12)..(12): Citrulline
FECKDCGKAFNXGSNL

SEQ ID NO: 8851 - protein, 16 aa, Artificial Sequence
  source: /note="Description of Artificial Sequence: Synthetic peptide"
  MOD_RES (8)..(8): Citrulline
DCGKAFNXGSNLVQHQ

SEQ ID NO: 8852 - protein, 16 aa, Artificial Sequence
  source: /note="Description of Artificial Sequence: Synthetic peptide"
  MOD_RES (8)..(8): Citrulline
ECGKAFNXGSNLVQPQ

SEQ ID NO: 8853 - protein, 16 aa, Artificial Sequence
  source: /note="Description of Artificial Sequence: Synthetic peptide"
  MOD_RES (4)..(4): Citrulline
AFNXGSNLVQPQSIHT

SEQ ID NO: 8854 - protein, 16 aa, Artificial Sequence
  source: /note="Description of Artificial Sequence: Synthetic peptide"
  MOD_RES (5)..(5): Citrulline
  MOD_RES (12)..(12): Citrulline
YQYDXSGPYGYXGIGG

SEQ ID NO: 8855 - protein, 16 aa, Artificial Sequence
  source: /note="Description of Artificial Sequence: Synthetic peptide"
  MOD_RES (1)..(1): Citrulline
  MOD_RES (8)..(8): Citrulline
XSGPYGYXGIGGMKPS

SEQ ID NO: 8856 - protein, 16 aa, Artificial Sequence
  source: /note="Description of Artificial Sequence: Synthetic peptide"
  MOD_RES (4)..(4): Citrulline
YGYXGIGGMKPSMSDT

SEQ ID NO: 8857 - protein, 16 aa, Artificial Sequence
  source: /note="Description of Artificial Sequence: Synthetic peptide"
  MOD_RES (11)..(11): Citrulline
  MOD_RES (13)..(13): Citrulline
KPTSLPISQSXGXIPI

SEQ ID NO: 8858 - protein, 16 aa, Artificial Sequence
  source: /note="Description of Artificial Sequence: Synthetic peptide"
  MOD_RES (7)..(7): Citrulline
  MOD_RES (9)..(9): Citrulline
LPISQSXGXIPIVAQN

SEQ ID NO: 8859 - protein, 16 aa, Artificial Sequence
  source: /note="Description of Artificial Sequence: Synthetic peptide"
  MOD_RES (5)..(5): Citrulline
  MOD_RES (7)..(7): Citrulline
LTHCXIXGGMLAMPKD

SEQ ID NO: 8860 - protein, 16 aa, Artificial Sequence
  source: /note="Description of Artificial Sequence: Synthetic peptide"
  MOD_RES (1)..(1): Citrulline
  MOD_RES (3)..(3): Citrulline
XIXGGMLAMPKDEAAN

SEQ ID NO: 8861 - protein, 16 aa, Artificial Sequence
  source: /note="Description of Artificial Sequence: Synthetic peptide"
  MOD_RES (7)..(7): Citrulline
  MOD_RES (11)..(11): Citrulline
PSESKPXGTSXLPAGQ

SEQ ID NO: 8862 - protein, 16 aa, Artificial Sequence
  source: /note="Description of Artificial Sequence: Synthetic peptide"
YMVLPWEQPQQTVPRS

SEQ ID NO: 8863 - protein, 16 aa, Artificial Sequence
  source: /note="Description of Artificial Sequence: Synthetic peptide"
PWEQPQQTVPRSPQQT

SEQ ID NO: 8864 - protein, 16 aa, Artificial Sequence
  source: /note="Description of Artificial Sequence: Synthetic peptide"
GGRAEAASWGDRGNDK

SEQ ID NO: 8865 - protein, 16 aa, Artificial Sequence
  source: /note="Description of Artificial Sequence: Synthetic peptide"
EAASWGDRGNDKGGLG

SEQ ID NO: 8866 - protein, 16 aa, Artificial Sequence
  source: /note="Description of Artificial Sequence: Synthetic peptide"
KPLFSSASPQDSSPRL

SEQ ID NO: 8867 - protein, 16 aa, Artificial Sequence
  source: /note="Description of Artificial Sequence: Synthetic peptide"
SSASPQDSSPRLSTFP

SEQ ID NO: 8868 - protein, 16 aa, Artificial Sequence
  source: /note="Description of Artificial Sequence: Synthetic peptide"
DDRSSPAVRAAGGGGG

SEQ ID NO: 8869 - protein, 16 aa, Artificial Sequence
  source: /note="Description of Artificial Sequence: Synthetic peptide"
SPAVRAAGGGGGGGGG

SEQ ID NO: 8870 - protein, 13 aa, Artificial Sequence
  source: /note="Description of Artificial Sequence: Synthetic peptide"
RAAGGGGGGGGGG

SEQ ID NO: 8871 - protein, 16 aa, Artificial Sequence
  source: /note="Description of Artificial Sequence: Synthetic peptide"
GVGGGGAGGGAGGGRS

SEQ ID NO: 8872 - protein, 16 aa, Artificial Sequence
  source: /note="Description of Artificial Sequence: Synthetic peptide"
GGAGGGAGGGRSPVRE

SEQ ID NO: 8873 - protein, 16 aa, Artificial Sequence
  source: /note="Description of Artificial Sequence: Synthetic peptide"
NLKVIDKGAGGGGAGQ

SEQ ID NO: 8874 - protein, 16 aa, Artificial Sequence
  source: /note="Description of Artificial Sequence: Synthetic peptide"
IDKGAGGGGAGQGAGA

SEQ ID NO: 8875 - protein, 15 aa, Artificial Sequence
  source: /note="Description of Artificial Sequence: Synthetic peptide"
GSSSGGYRGGSGGGG

SEQ ID NO: 8876 - protein, 14 aa, Artificial Sequence
  source: /note="Description of Artificial Sequence: Synthetic peptide"
GGYRGGSGGGGGGS

SEQ ID NO: 8877 - protein, 16 aa, Artificial Sequence
  source: /note="Description of Artificial Sequence: Synthetic peptide"
MFLVNSFLKGGGGGGG

SEQ ID NO: 8878 - protein, 15 aa, Artificial Sequence
  source: /note="Description of Artificial Sequence: Synthetic peptide"
NSFLKGGGGGGGGGG

SEQ ID NO: 8879 - protein, 16 aa, Artificial Sequence
  source: /note="Description of Artificial Sequence: Synthetic peptide"
EVLVERNPDPAISVAP

SEQ ID NO: 8880 - protein, 16 aa, Artificial Sequence
  source: /note="Description of Artificial Sequence: Synthetic peptide"
ERNPDPAISVAPARAQ

SEQ ID NO: 8881 - protein, 16 aa, Artificial Sequence
  source: /note="Description of Artificial Sequence: Synthetic peptide"
AAAGRFGAGGGAAGAV

SEQ ID NO: 8882 - protein, 16 aa, Artificial Sequence
  source: /note="Description of Artificial Sequence: Synthetic peptide"
GSSGGGGRGGGSFGGG

SEQ ID NO: 8883 - protein, 16 aa, Artificial Sequence
  source: /note="Description of Artificial Sequence: Synthetic peptide"
GGGRGGGSFGGGYGGG

SEQ ID NO: 8884 - protein, 16 aa, Artificial Sequence
  source: /note="Description of Artificial Sequence: Synthetic peptide"
YFYPRGGGSGGGAGGA

SEQ ID NO: 8885 - protein, 15 aa, Artificial Sequence
  source: /note="Description of Artificial Sequence: Synthetic peptide"
RGGGSGGGAGGAGGG

SEQ ID NO: 8886 - protein, 16 aa, Artificial Sequence
  source: /note="Description of Artificial Sequence: Synthetic peptide"
QEEGLHTSIYSFDETK

SEQ ID NO: 8887 - protein, 16 aa, Artificial Sequence
  source: /note="Description of Artificial Sequence: Synthetic peptide"
LHTSIYSFDETKDLDL

SEQ ID NO: 8888 - protein, 16 aa, Artificial Sequence
  source: /note="Description of Artificial Sequence: Synthetic peptide"
AGTCCAGAGGGRGGGA

SEQ ID NO: 8889 - protein, 16 aa, Artificial Sequence
  source: /note="Description of Artificial Sequence: Synthetic peptide"
CAGAGGGRGGGAGGEG

SEQ ID NO: 8890 - protein, 16 aa, Artificial Sequence
  source: /note="Description of Artificial Sequence: Synthetic peptide"
EYEEDRGKGFFPQTIT

SEQ ID NO: 8891 - protein, 16 aa, Artificial Sequence
  source: /note="Description of Artificial Sequence: Synthetic peptide"
DRGKGFFPQTITQEYE

SEQ ID NO: 8892 - protein, 16 aa, Artificial Sequence
  source: /note="Description of Artificial Sequence: Synthetic peptide"
TPQPPVDCVKTSGGGG

SEQ ID NO: 8893 - protein, 16 aa, Artificial Sequence
  source: /note="Description of Artificial Sequence: Synthetic peptide"
PVDCVKTSGGGGGGGG

SEQ ID NO: 8894 - protein, 16 aa, Artificial Sequence
  source: /note="Description of Artificial Sequence: Synthetic peptide"
VKTSGGGGGGGGSGGG

SEQ ID NO: 8895 - protein, 16 aa, Artificial Sequence
  source: /note="Description of Artificial Sequence: Synthetic peptide"
LWNMSAANNNIKLLDK

SEQ ID NO: 8896 - protein, 16 aa, Artificial Sequence
  source: /note="Description of Artificial Sequence: Synthetic peptide"
SAANNNIKLLDKSDTA

SEQ ID NO: 8897 - protein, 16 aa, Artificial Sequence
  source: /note="Description of Artificial Sequence: Synthetic peptide"
SLISSGRGEAGGGGGG

SEQ ID NO: 8898 - protein, 16 aa, Artificial Sequence
  source: /note="Description of Artificial Sequence: Synthetic peptide"
SGRGEAGGGGGGAGGG

SEQ ID NO: 8899 - protein, 16 aa, Artificial Sequence
  source: /note="Description of Artificial Sequence: Synthetic peptide"
PSTSAPGRGGRGGGGG

SEQ ID NO: 8900 - protein, 15 aa, Artificial Sequence
  source: /note="Description of Artificial Sequence: Synthetic peptide"
GGRGGGGGRTGGGGG

SEQ ID NO: 8901 - protein, 16 aa, Artificial Sequence
  source: /note="Description of Artificial Sequence: Synthetic peptide"
MSSAPEKQQPPHGGGG

SEQ ID NO: 8902 - protein, 16 aa, Artificial Sequence
  source: /note="Description of Artificial Sequence: Synthetic peptide"
PEKQQPPHGGGGGGGG

SEQ ID NO: 8903 - protein, 16 aa, Artificial Sequence
  source: /note="Description of Artificial Sequence: Synthetic peptide"
PSAACKSAGGGGAGAG

SEQ ID NO: 8904 - protein, 16 aa, Artificial Sequence
  source: /note="Description of Artificial Sequence: Synthetic peptide"
CKSAGGGGAGAGSGGA

SEQ ID NO: 8905 - protein, 16 aa, Artificial Sequence
  source: /note="Description of Artificial Sequence: Synthetic peptide"
LKRHGKYCHLRGGGGG

SEQ ID NO: 8906 - protein, 14 aa, Artificial Sequence
  source: /note="Description of Artificial Sequence: Synthetic peptide"
GKYCHLRGGGGGGG

SEQ ID NO: 8907 - protein, 16 aa, Artificial Sequence
  source: /note="Description of Artificial Sequence: Synthetic peptide"
HQQWTELNSTHLPDKP

SEQ ID NO: 8908 - protein, 16 aa, Artificial Sequence
  source: /note="Description of Artificial Sequence: Synthetic peptide"
TELNSTHLPDKPSSME

SEQ ID NO: 8909 - protein, 16 aa, Artificial Sequence
  source: /note="Description of Artificial Sequence: Synthetic peptide"
GSGSGQSSGFGQHESR

SEQ ID NO: 8910 - protein, 16 aa, Artificial Sequence
  source: /note="Description of Artificial Sequence: Synthetic peptide"
GQSSGFGQHESRSGQS

SEQ ID NO: 8911 - protein, 16 aa, Artificial Sequence
  source: /note="Description of Artificial Sequence: Synthetic peptide"
GFGQHESRSGQSSYGQ

SEQ ID NO: 8912 - protein, 16 aa, Artificial Sequence
  source: /note="Description of Artificial Sequence: Synthetic peptide"
SGSGQSSGFGQHESRS

SEQ ID NO: 8913 - protein, 16 aa, Artificial Sequence
  source: /note="Description of Artificial Sequence: Synthetic peptide"
QSSGFGQHESRSGHSS

SEQ ID NO: 8914 - protein, 16 aa, Artificial Sequence
  source: /note="Description of Artificial Sequence: Synthetic peptide"
QSSGFGQHESRSHQSS

SEQ ID NO: 8915 - protein, 16 aa, Artificial Sequence
  source: /note="Description of Artificial Sequence: Synthetic peptide"
GTGSGQYSGFGQHESR

SEQ ID NO: 8916 - protein, 16 aa, Artificial Sequence
  source: /note="Description of Artificial Sequence: Synthetic peptide"
GQYSGFGQHESRSHQS

SEQ ID NO: 8917 - protein, 16 aa, Artificial Sequence
  source: /note="Description of Artificial Sequence: Synthetic peptide"
ISEDLPSDPQDTPPRS

SEQ ID NO: 8918 - protein, 16 aa, Artificial Sequence
  source: /note="Description of Artificial Sequence: Synthetic peptide"
LPSDPQDTPPRSGPAT

SEQ ID NO: 8919 - protein, 15 aa, Artificial Sequence
  source: /note="Description of Artificial Sequence: Synthetic peptide"
DVLLSGRGGGGGGGG

SEQ ID NO: 8920 - protein, 13 aa, Artificial Sequence
  source: /note="Description of Artificial Sequence: Synthetic peptide"
EPAAARGGGGGGG

SEQ ID NO: 8921 - protein, 12 aa, Artificial Sequence
  source: /note="Description of Artificial Sequence: Synthetic peptide"
ARGGGGGGGGGG

SEQ ID NO: 8922 - protein, 16 aa, Artificial Sequence
  source: /note="Description of Artificial Sequence: Synthetic peptide"
ASPRDKHPGNGGGGGG

SEQ ID NO: 8923 - protein, 15 aa, Artificial Sequence
  source: /note="Description of Artificial Sequence: Synthetic peptide"
DKHPGNGGGGGGGGG

SEQ ID NO: 8924 - protein, 16 aa, Artificial Sequence
  source: /note="Description of Artificial Sequence: Synthetic peptide"
TPPPQKKEDDFLNNAM

SEQ ID NO: 8925 - protein, 16 aa, Artificial Sequence
  source: /note="Description of Artificial Sequence: Synthetic peptide"
QKKEDDFLNNAMSSLY

SEQ ID NO: 8926 - protein, 16 aa, Artificial Sequence
  source: /note="Description of Artificial Sequence: Synthetic peptide"
HYPGYSRPGAGGGGGG

SEQ ID NO: 8927 - protein, 16 aa, Artificial Sequence
  source: /note="Description of Artificial Sequence: Synthetic peptide"
YSRPGAGGGGGGGGGG

SEQ ID NO: 8928 - protein, 16 aa, Artificial Sequence
  source: /note="Description of Artificial Sequence: Synthetic peptide"
ATAHSQSSPEFKGSLA

SEQ ID NO: 8929 - protein, 16 aa, Artificial Sequence
  source: /note="Description of Artificial Sequence: Synthetic peptide"
ELWKSSLRAGGGGGGG

SEQ ID NO: 8930 - protein, 15 aa, Artificial Sequence
  source: /note="Description of Artificial Sequence: Synthetic peptide"
SSLRAGGGGGGGGGG

SEQ ID NO: 8931 - protein, 16 aa, Artificial Sequence
  source: /note="Description of Artificial Sequence: Synthetic peptide"
LCHHCTGRGGAGSGGA

SEQ ID NO: 8932 - protein, 16 aa, Artificial Sequence
  source: /note="Description of Artificial Sequence: Synthetic peptide"
CTGRGGAGSGGAGSGA

SEQ ID NO: 8933 - protein, 16 aa, Artificial Sequence
  source: /note="Description of Artificial Sequence: Synthetic peptide"
MALADSTRGLPNGGGG

SEQ ID NO: 8934 - protein, 14 aa, Artificial Sequence
  source: /note="Description of Artificial Sequence: Synthetic peptide"
DSTRGLPNGGGGGG

SEQ ID NO: 8935 - protein, 16 aa, Artificial Sequence
  source: /note="Description of Artificial Sequence: Synthetic peptide"
PGSDKKEPGGGGGGGG

SEQ ID NO: 8936 - protein, 14 aa, Artificial Sequence
  source: /note="Description of Artificial Sequence: Synthetic peptide"
KKEPGGGGGGGGGG

SEQ ID NO: 8937 - protein, 16 aa, Artificial Sequence
  source: /note="Description of Artificial Sequence: Synthetic peptide"
EGAPIEPDPPVSHWKP

SEQ ID NO: 8938 - protein, 16 aa, Artificial Sequence
  source: /note="Description of Artificial Sequence: Synthetic peptide"
IEPDPPVSHWKPEAVQ

SEQ ID NO: 8939 - protein, 16 aa, Artificial Sequence
  source: /note="Description of Artificial Sequence: Synthetic peptide"
FPQPRSALQAAKDQFN

SEQ ID NO: 8940 - protein, 16 aa, Artificial Sequence
  source: /note="Description of Artificial Sequence: Synthetic peptide"
RSALQAAKDQFNEGRK

SEQ ID NO: 8941 - protein, 16 aa, Artificial Sequence
  source: /note="Description of Artificial Sequence: Synthetic peptide"
DDSPRSALAAATAAAA

SEQ ID NO: 8942 - protein, 15 aa, Artificial Sequence
  source: /note="Description of Artificial Sequence: Synthetic peptide"
RSALAAATAAAAAAA

SEQ ID NO: 8943 - protein, 16 aa, Artificial Sequence
  source: /note="Description of Artificial Sequence: Synthetic peptide"
LGAPAPEPKPEPEPPA

SEQ ID NO: 8944 - protein, 16 aa, Artificial Sequence
  source: /note="Description of Artificial Sequence: Synthetic peptide"
APEPKPEPEPPARAPT

SEQ ID NO: 8945 - protein, 16 aa, Artificial Sequence
  source: /note="Description of Artificial Sequence: Synthetic peptide"
GPAGGHGGNRGSGGGG

SEQ ID NO: 8946 - protein, 16 aa, Artificial Sequence
  source: /note="Description of Artificial Sequence: Synthetic peptide"
GHGGNRGSGGGGGGGG

SEQ ID NO: 8947 - protein, 16 aa, Artificial Sequence
  source: /note="Description of Artificial Sequence: Synthetic peptide"
YGAMGSPGAGGGRGFQ

SEQ ID NO: 8948 - protein, 16 aa, Artificial Sequence
  source: /note="Description of Artificial Sequence: Synthetic peptide"
GSPGAGGGRGFQMQPQ

SEQ ID NO: 8949 - protein, 16 aa, Artificial Sequence
  source: /note="Description of Artificial Sequence: Synthetic peptide"
FEGSGVPYGPINNMKN

SEQ ID NO: 8950 - protein, 16 aa, Artificial Sequence
  source: /note="Description of Artificial Sequence: Synthetic peptide"
GVPYGPINNMKNVFAE

SEQ ID NO: 8951 - protein, 16 aa, Artificial Sequence
  source: /note="Description of Artificial Sequence: Synthetic peptide"
EEEKTPPETKPDPPVN

SEQ ID NO: 8952 - protein, 16 aa, Artificial Sequence
  source: /note="Description of Artificial Sequence: Synthetic peptide"
TPPETKPDPPVNFLRQ

SEQ ID NO: 8953 - protein, 15 aa, Artificial Sequence
  source: /note="Description of Artificial Sequence: Synthetic peptide"
NRGGSSNHFRGGGGG

SEQ ID NO: 8954 - protein, 14 aa, Artificial Sequence
  source: /note="Description of Artificial Sequence: Synthetic peptide"
SSNHFRGGGGGGGG

SEQ ID NO: 8955 - protein, 16 aa, Artificial Sequence
  source: /note="Description of Artificial Sequence: Synthetic peptide"
FVQDEKGAFNFDQETV

SEQ ID NO: 8956 - protein, 16 aa, Artificial Sequence
  source: /note="Description of Artificial Sequence: Synthetic peptide"
EKGAFNFDQETVINPE

SEQ ID NO: 8957 - protein, 16 aa, Artificial Sequence
  source: /note="Description of Artificial Sequence: Synthetic peptide"
RGGAAGMAGAGAGAGA

SEQ ID NO: 8958 - protein, 16 aa, Artificial Sequence
  source: /note="Description of Artificial Sequence: Synthetic peptide"
AGMAGAGAGAGARGGA

SEQ ID NO: 8959 - protein, 16 aa, Artificial Sequence
  source: /note="Description of Artificial Sequence: Synthetic peptide"
PSDEEGRGGAGGGGAG

SEQ ID NO: 8960 - protein, 16 aa, Artificial Sequence
  source: /note="Description of Artificial Sequence: Synthetic peptide"
EGRGGAGGGGAGSEHS

SEQ ID NO: 8961 - protein, 16 aa, Artificial Sequence
  source: /note="Description of Artificial Sequence: Synthetic peptide"
NASSPASVPEYTGPRL

SEQ ID NO: 8962 - protein, 16 aa, Artificial Sequence
  source: /note="Description of Artificial Sequence: Synthetic peptide"
PASVPEYTGPRLYKEP

SEQ ID NO: 8963 - protein, 16 aa, Artificial Sequence
  source: /note="Description of Artificial Sequence: Synthetic peptide"
PCKQPRCGGGGCGGGG

SEQ ID NO: 8964 - protein, 14 aa, Artificial Sequence
  source: /note="Description of Artificial Sequence: Synthetic peptide"
PRCGGGGCGGGGGG

SEQ ID NO: 8965 - protein, 15 aa, Artificial Sequence
  source: /note="Description of Artificial Sequence: Synthetic peptide"
GGGGGSGGGGSGGGR

SEQ ID NO: 8966 - protein, 16 aa, Artificial Sequence
  source: /note="Description of Artificial Sequence: Synthetic peptide"
PAGEPQKGGGAGGGGG

SEQ ID NO: 8967 - protein, 16 aa, Artificial Sequence
  source: /note="Description of Artificial Sequence: Synthetic peptide"
PQKGGGAGGGGGAASG

SEQ ID NO: 8968 - protein, 16 aa, Artificial Sequence
  source: /note="Description of Artificial Sequence: Synthetic peptide"
  MOD_RES (3)..(3): Citrulline
  MOD_RES (12)..(12): Citrulline
GGXAEAASWGDXGNDK

SEQ ID NO: 8969 - protein, 16 aa, Artificial Sequence
  source: /note="Description of Artificial Sequence: Synthetic peptide"
  MOD_RES (8)..(8): Citrulline
EAASWGDXGNDKGGLG

SEQ ID NO: 8970 - protein, 16 aa, Artificial Sequence
  source: /note="Description of Artificial Sequence: Synthetic peptide"
  MOD_RES (4)..(4): Citrulline
WGDXGNDKGGLGNPDM

SEQ ID NO: 8971 - protein, 16 aa, Artificial Sequence
  source: /note="Description of Artificial Sequence: Synthetic peptide"
  MOD_RES (3)..(3): Citrulline
  MOD_RES (9)..(9): Citrulline
DDXSSPAVXAAGGGGG

SEQ ID NO: 8972 - protein, 16 aa, Artificial Sequence
  source: /note="Description of Artificial Sequence: Synthetic peptide"
  MOD_RES (5)..(5): Citrulline
SPAVXAAGGGGGGGGG

SEQ ID NO: 8973 - protein, 13 aa, Artificial Sequence
  source: /note="Description of Artificial Sequence: Synthetic peptide"
  MOD_RES (1)..(1): Citrulline
XAAGGGGGGGGGG

SEQ ID NO: 8974 - protein, 16 aa, Artificial Sequence
  source: /note="Description of Artificial Sequence: Synthetic peptide"
  MOD_RES (1)..(1): Citrulline
  MOD_RES (3)..(3): Citrulline
XKXGFQEVVTPNIFNS

SEQ ID NO: 8975 - protein, 16 aa, Artificial Sequence
  source: /note="Description of Artificial Sequence: Synthetic peptide"
  MOD_RES (13)..(13): Citrulline
FQEVVTPNIFNSXLWM

SEQ ID NO: 8976 - protein, 16 aa, Artificial Sequence
  source: /note="Description of Artificial Sequence: Synthetic peptide"
  MOD_RES (7)..(7): Citrulline
SLISSGXGEAGGGGGG

SEQ ID NO: 8977 - protein, 16 aa, Artificial Sequence
  source: /note="Description of Artificial Sequence: Synthetic peptide"
  MOD_RES (3)..(3): Citrulline
SGXGEAGGGGGGAGGG

SEQ ID NO: 8978 - protein, 16 aa, Artificial Sequence
  source: /note="Description of Artificial Sequence: Synthetic peptide"
  MOD_RES (3)..(3): Citrulline
  MOD_RES (11)..(11): Citrulline
LKXHGKYCHLXGGGGG

SEQ ID NO: 8979 - protein, 14 aa, Artificial Sequence
  source: /note="Description of Artificial Sequence: Synthetic peptide"
  MOD_RES (7)..(7): Citrulline
GKYCHLXGGGGGGG

SEQ ID NO: 8980 - protein, 16 aa, Artificial Sequence
  source: /note="Description of Artificial Sequence: Synthetic peptide"
  MOD_RES (16)..(16): Citrulline
GSGSGQSSGFGQHESX

SEQ ID NO: 8981 - protein, 16 aa, Artificial Sequence
  source: /note="Description of Artificial Sequence: Synthetic peptide"
  MOD_RES (12)..(12): Citrulline
GQSSGFGQHESXSGQS

SEQ ID NO: 8982 - protein, 16 aa, Artificial Sequence
  source: /note="Description of Artificial Sequence: Synthetic peptide"
  MOD_RES (15)..(15): Citrulline
SGSGQSSGFGQHESXS

SEQ ID NO: 8983 - protein, 16 aa, Artificial Sequence
  source: /note="Description of Artificial Sequence: Synthetic peptide"
  MOD_RES (11)..(11): Citrulline
QSSGFGQHESXSGHSS

SEQ ID NO: 8984 - protein, 16 aa, Artificial Sequence
  source: /note="Description of Artificial Sequence: Synthetic peptide"
  MOD_RES (11)..(11): Citrulline
QSSGFGQHESXSHQSS

SEQ ID NO: 8985 - protein, 16 aa, Artificial Sequence
  source: /note="Description of Artificial Sequence: Synthetic peptide"
  MOD_RES (11)..(11): Citrulline
SGQTSGFGQHXSSSGQ

SEQ ID NO: 8986 - protein, 16 aa, Artificial Sequence
  source: /note="Description of Artificial Sequence: Synthetic peptide"
  MOD_RES (7)..(7): Citrulline
SGFGQHXSSSGQYSGF

SEQ ID NO: 8987 - protein, 16 aa, Artificial Sequence
  source: /note="Description of Artificial Sequence: Synthetic peptide"
  MOD_RES (13)..(13): Citrulline
SSSGQTTGFGQHXSSS

SEQ ID NO: 8988 - protein, 16 aa, Artificial Sequence
  source: /note="Description of Artificial Sequence: Synthetic peptide"
  MOD_RES (9)..(9): Citrulline
QTTGFGQHXSSSGQYS

SEQ ID NO: 8989 - protein, 13 aa, Artificial Sequence
  source: /note="Description of Artificial Sequence: Synthetic peptide"
  MOD_RES (6)..(6): Citrulline
EPAAAXGGGGGGG

SEQ ID NO: 8990 - protein, 12 aa, Artificial Sequence
  source: /note="Description of Artificial Sequence: Synthetic peptide"
  MOD_RES (2)..(2): Citrulline
AXGGGGGGGGGG

SEQ ID NO: 8991 - protein, 16 aa, Artificial Sequence
  source: /note="Description of Artificial Sequence: Synthetic peptide"
  MOD_RES (14)..(14): Citrulline
EKPQLIADPEPKPXKP

SEQ ID NO: 8992 - protein, 16 aa, Artificial Sequence
  source: /note="Description of Artificial Sequence: Synthetic peptide"
  MOD_RES (10)..(10): Citrulline
LIADPEPKPXKPATSS

SEQ ID NO: 8993 - protein, 16 aa, Artificial Sequence
  source: /note="Description of Artificial Sequence: Synthetic peptide"
  MOD_RES (7)..(7): Citrulline
HYPGYSXPGAGGGGGG

SEQ ID NO: 8994 - protein, 16 aa, Artificial Sequence
  source: /note="Description of Artificial Sequence: Synthetic peptide"
  MOD_RES (3)..(3): Citrulline
YSXPGAGGGGGGGGGG

SEQ ID NO: 8995 - protein, 16 aa, Artificial Sequence
  source: /note="Description of Artificial Sequence: Synthetic peptide"
  MOD_RES (8)..(8): Citrulline
ELWKSSLXAGGGGGGG

SEQ ID NO: 8996 - protein, 15 aa, Artificial Sequence
  source: /note="Description of Artificial Sequence: Synthetic peptide"
  MOD_RES (4)..(4): Citrulline
SSLXAGGGGGGGGGG

SEQ ID NO: 8997 - protein, 16 aa, Artificial Sequence
  source: /note="Description of Artificial Sequence: Synthetic peptide"
  MOD_RES (5)..(5): Citrulline
DDSPXSALAAATAAAA

SEQ ID NO: 8998 - protein, 15 aa, Artificial Sequence
  source: /note="Description of Artificial Sequence: Synthetic peptide"
  MOD_RES (1)..(1): Citrulline
XSALAAATAAAAAAA

SEQ ID NO: 8999 - protein, 16 aa, Artificial Sequence
  source: /note="Description of Artificial Sequence: Synthetic peptide"
  MOD_RES (14)..(14): Citrulline
PDGDAGGGGGAGGXSL

SEQ ID NO: 9000 - protein, 16 aa, Artificial Sequence
  source: /note="Description of Artificial Sequence: Synthetic peptide"
  MOD_RES (10)..(10): Citrulline
AGGGGGAGGXSLGSGP

SEQ ID NO: 9001 - protein, 16 aa, Artificial Sequence
  source: /note="Description of Artificial Sequence: Synthetic peptide"
  MOD_RES (2)..(2): Citrulline
  MOD_RES (15)..(15): Citrulline
EXVEGLGAGAGGAGXP

SEQ ID NO: 9002 - protein, 16 aa, Artificial Sequence
  source: /note="Description of Artificial Sequence: Synthetic peptide"
  MOD_RES (11)..(11): Citrulline
GLGAGAGGAGXPFGLT

SEQ ID NO: 9003 - protein, 14 aa, Artificial Sequence
  source: /note="Description of Artificial Sequence: Synthetic peptide"
  MOD_RES (6)..(6): Citrulline
SSNHFXGGGGGGGG

SEQ ID NO: 9004 - protein, 16 aa, Artificial Sequence
  source: /note="Description of Artificial Sequence: Synthetic peptide"
  MOD_RES (6)..(6): Citrulline
PCKQPXCGGGGCGGGG

SEQ ID NO: 9005 - protein, 14 aa, Artificial Sequence
  source: /note="Description of Artificial Sequence: Synthetic peptide"
  MOD_RES (2)..(2): Citrulline
PXCGGGGCGGGGGG

SEQ ID NO: 9006 - protein, 16 aa, Artificial Sequence
  source: /note="Description of Artificial Sequence: Synthetic peptide"
  MOD_RES (10)..(10): Citrulline
  MOD_RES (13)..(13): Citrulline
NAWHDVKVTXNLXQHS

SEQ ID NO: 9007 - protein, 16 aa, Artificial Sequence
  source: /note="Description of Artificial Sequence: Synthetic peptide"
  MOD_RES (13)..(13): Citrulline
  MOD_RES (15)..(15): Citrulline
CVKDQEAQEPKPXKXA

SEQ ID NO: 9008 - protein, 16 aa, Artificial Sequence
  source: /note="Description of Artificial Sequence: Synthetic peptide"
  MOD_RES (9)..(9): Citrulline
  MOD_RES (11)..(11): Citrulline
QEAQEPKPXKXANSCS

SEQ ID NO: 9009 - protein, 16 aa, Artificial Sequence
  source: /note="Description of Artificial Sequence: Synthetic peptide"
  MOD_RES (7)..(7): HomoCitrulline
MSSAPEXQQPPHGGGG

SEQ ID NO: 9010 - protein, 16 aa, Artificial Sequence
  source: /note="Description of Artificial Sequence: Synthetic peptide"
  MOD_RES (3)..(3): HomoCitrulline
PEXQQPPHGGGGGGGG

SEQ ID NO: 9011 - protein, 16 aa, Artificial Sequence
  source: /note="Description of Artificial Sequence: Synthetic peptide"
  MOD_RES (7)..(7): HomoCitrulline
GSCTYDXVQSYNSDIN

SEQ ID NO: 9012 - protein, 16 aa, Artificial Sequence
  source: /note="Description of Artificial Sequence: Synthetic peptide"
  MOD_RES (3)..(3): HomoCitrulline
YDXVQSYNSDINEWSL

SEQ ID NO: 9013 - protein, 16 aa, Artificial Sequence
  source: /note="Description of Artificial Sequence: Synthetic peptide"
  MOD_RES (12)..(12): HomoCitrulline
ATAHSQSSPEFXGSLA

SEQ ID NO: 9014 - protein, 16 aa, Artificial Sequence
  source: /note="Description of Artificial Sequence: Synthetic peptide"
  MOD_RES (8)..(8): HomoCitrulline
SPVSVSMXPDLPVSLP

SEQ ID NO: 9015 - protein, 16 aa, Artificial Sequence
  source: /note="Description of Artificial Sequence: Synthetic peptide"
  MOD_RES (4)..(4): HomoCitrulline
VSMXPDLPVSLPTQTA

1. A composition, comprising:
a plurality of molecules, each molecule comprising a peptide having a sequence selected from SEQ ID NOS: 1-8861,
wherein the plurality of molecules defines a classifier for rheumatoid arthritis.

2. The composition of claim 1, wherein the classifier discriminates between a sample derived from a first population and a sample derived from a second population.

3. The composition of claim 2, wherein the first population is defined by subjects having at least one marker associated with a first disease state and the second population is defined by subjects lacking the at least one marker associated with the first disease state.

4. The composition of claim 3, wherein the first disease state is rheumatoid arthritis.

5. The composition of claim 3, wherein the marker associated with a first disease state is one of an antibody and a serum marker.

6. The composition of claim 1, wherein the classifier discriminates between a sample derived from a first population and a sample derived from a second population,
wherein the sample derived from the first population comprises at least one marker associated with a first disease state and the sample derived from the second population lacks the at least one marker associated with the first disease state.

7. The composition of claim 1, wherein the classifier discriminates between a sample derived from a first population and a sample derived from a second population,
wherein at least one marker associated with a first disease state is present in the sample derived from the first population and wherein the at least one marker is absent in the sample derived from the second population.

8. The composition of claim 3, wherein the marker is one of an anti-citrullinated peptide antibody, and anti-homocitrullinated peptide antibody, an autoantibody, an anti-cyclic citrullinated peptide antibody, and an anti-cyclic homocitrullinated peptide antibody.

9. The composition of claim 1, wherein the plurality of molecules comprises at least 3 different molecules.

10. The composition of claim 1, wherein the classifier distinguishes between a sample derived from a first group defined by a first disease state and a sample derived from a second group defined by a second disease state.

11. The composition of claim 10, wherein the first group is defined by subjects having a positive diagnosis for rheumatoid arthritis.

12. The classifier of claim 1, wherein the synthetic classifier is one of a diagnostic classifier and a prognostic classifier.

13. The composition of claim 1, wherein the plurality of molecules comprises peptides having a sequence selected from a first list, the first list consisting of the sequences listed in Table 1 (SEQ ID NOS: 1-8).

14. A peptide classifier, comprising:
a plurality of molecules, each molecule comprising a peptide having a sequence selected from SEQ ID NOS: 1-8861, the molecules representing at least 3 different sequences selected from SEQ ID NOS: 1-8861.

15. A method for identifying the presence of an antibody indicative of rheumatoid arthritis in a sample, the method comprising:
contacting a sample derived from a subject with a composition, the composition comprising a plurality of molecules, each molecule comprising a peptide having a sequence selected from SEQ ID NOS: 1-8861, the molecules representing at least 3 different sequences selected from SEQ ID NOS: 1-8861;
binding an antibody present in the sample to at least one of the plurality of molecules, thereby forming an antibody-peptide conjugate; and
detecting the antibody-peptide conjugate, thereby identifying the presence of the antibody in the sample.

16. A kit for identifying the presence of an antibody indicative of rheumatoid arthritis in a sample, the kit comprising:
a solid support having a plurality of molecules bound thereon, each molecule comprising a peptide having a sequence selected from SEQ ID NOS: 1-8861, the molecules representing at least 3 different sequences selected from SEQ ID NOS: 1-8861; and
a detectable antibody to a human antibody.

17. The kit of claim 24, wherein the human antibody is one of an anti-citrullinated peptide antibody, and anti-homocitrullinated peptide antibody, an autoantibody, and an anti-cyclic citrullinated peptide antibody.

18. A device for identifying the presence of an antibody indicative of rheumatoid arthritis in a sample, the device comprising:
A solid support or a flow cell having a plurality of molecules bound therein, each molecule comprising a peptide having a sequence selected from SEQ ID NOS: 1-8861, the molecules representing at least 3 different sequences selected from SEQ ID NOS: 1-8861, said solid support or flow cell capable of receiving a sample derived from a subject at the location of the plurality of molecules.
